(19) United States
(12) Patent Application Publication
(10) Pub. No.: US 2019/0024184 A1
(43) Pub. Date: Jan. 24, 2019

(54) DISTINGUISHING METASTATIC-LETHAL PROSTATE CANCER FROM INDOLENT PROSTATE CANCER USING METHYLATION STATUS OF EPIGENETIC MARKERS

(71) Applicant: Fred Hutchinson Cancer Research Center, Seattle, WA (US)

(72) Inventors: Janet Stanford, Seattle, WA (US); Ziding Feng, Seattle, WA (US)

(73) Assignee: Fred Hutchinson Cancer Research Center, Seattle, WA (US)

(21) Appl. No.: 16/065,662

(22) PCT Filed: Dec. 22, 2016
(86) PCT No.: PCT/US2016/068291

§ 371 Date: Jun. 22, 2018

Related U.S. Application Data
(60) Provisional application No. 62/387,273, filed on Dec. 23, 2015.

(51) Int. Cl. C12Q 1/6886

(52) U.S. Cl. CPC C12Q 1/6886; C12Q 2600/154

(57) ABSTRACT

Methods and kits to distinguish metastatic-lethal prostate cancer (PCa) from indolent PCa in a subject are described. The methods and kits utilize the methylation status of genetic markers. Distinguishing metastatic-lethal PCa from indolent PCa informs more directed treatments at an earlier time point than previously available.

### CROSS REFERENCE TO RELATED APPLICATION

[0001] This application claims priority to U.S. Provisional Patent Application No. 62/387,273 filed on Dec. 23, 2015, which is incorporated by reference herein in its entirety.

### STATEMENT REGARDING FEDERALLY SPONSORED RESEARCH OR DEVELOPMENT

[0002] This invention was made with government support under CA097186 awarded by the National Institutes of Health. The government has certain rights in the invention.

### REFERENCE TO SEQUENCE LISTING

[0003] A computer readable text file, entitled “DN1LK5845.txt (Sequence Listing.txt)” created on or about Dec. 20, 2016, with a file size of 612 KB, contains the sequence listing for this application and is hereby incorporated by reference in its entirety.

### FIELD OF THE DISCLOSURE

[0004] The present disclosure provides methods and kits to distinguish metastatic-lethal prostate cancer (PCa) from indolent PCa using the methylation status of epigenetic markers evaluated in tumor tissue. The epigenetic markers include CpG methylation sites within Intergenic 1, Intergenic 2, Intergenic 3, PI15, FHAD1, ALKBH5, KLHL8, and/or ATP11A.

### BACKGROUND OF THE DISCLOSURE

[0005] Prostate cancer (PCa) is a biologically and clinically heterogeneous disease with 220,800 new cases and 27,540 cancer-specific deaths expected in the U.S. for 2015 and over 300,000 deaths worldwide each year. PCa most often has an indolent course, but a subset of 20-30% of patients progress to metastasis and eventually die from PCa. To date, the single most important predictor of prognosis is the Gleason score, which a pathologist assigns by histologic examination of biopsy tissue. However, Gleason score is frequently inaccurate, particularly when a small amount of tumor is available. By comparing the Gleason score of the diagnostic biopsy to subsequent prostatectomy, upgrading and downgrading occurs in 14% to 51% and 9%, respectively. Furthermore, while a tumor with Gleason score 3+3=6 is low-risk and Gleason score 4+4=8 or greater is high-risk, tumors that are 3+4 or 4+3 are heterogeneous and include a substantial proportion of tumors. Thus, research efforts are focused on finding prognostic biomarkers that can improve patient classification for targeting therapies to those patients most likely to benefit.

[0006] Recent biomarker studies have mostly focused on altered tumor tissue gene expression profiles, leading to development of tests for mRNA signatures of tumor aggressiveness. Epigenetic alterations in tumor DNA may also provide valuable prognostic information. The most widely studied epigenetic modification is DNA methylation, which occurs at CpG sites across the genome and regulates gene expression. To date, studies of DNA methylation and PCa progression have been limited to small sets of candidate genes in relation to biochemical (i.e., prostate-specific antigen, PSA) recurrence. Although patients with biochemical progression are at higher risk of PCa-related death, this is still a biologically heterogeneous group and most will not die from PCa. Studies of patients with biochemical recurrence after radical prostatectomy found that only 17% to 21.5% died of PCa after a median follow-up of 10 years.

### SUMMARY OF THE DISCLOSURE

[0007] Epigenome-wide DNA methylation profiles in primary prostate cancers were investigated. The study included a population-based radical prostatectomy cohort with long-term follow-up for metastatic progression and cancer-specific mortality. The goal of this study was to detect differentially methylated CpG biomarkers that distinguish metastatic-lethal PCa from indolent PCa or non-recurrent disease.

[0008] Eight differentially methylated CpGs that distinguish tumors with metastatic-lethal potential from more indolent tumors that do not recur within five or more years after diagnosis were identified and then validated in an independent patient cohort. These epigenetic biomarkers improve prognostic determination and clinical decision making for newly diagnosed prostate cancer patients with clinically localized disease. These CpG markers include Intergenic 1; Intergenic 2; FHAD1; ALKBH5; KLHL8; ATP11A; Intergenic 3; and PI15. Combination of detection of methylations status of these CpG markers improves the prognostic discrimination of Gleason scores.

### BRIEF DESCRIPTION OF THE FIGURES

[0009] FIG. 1. Characteristics of the two Prostate Cancer (PCa) patient populations.

[0010] FIG. 2. Top-ranked 42 DNA methylation biomarkers for classification of metastatic-lethal PCa in the Fred Hutchinson Cancer Research Center (FH) cohort.

[0011] FIG. 3. Number of times the 42 DNA methylation biomarkers were selected in the bootstrap samples (n=100, per Criterion).

[0012] FIG. 4. Eight validated DNA methylation biomarkers for classification of metastatic-lethal PCa in the Eastern Virginia Medical School (EV) cohort.

[0013] FIG. 5. ROC curves for predicting metastatic-lethal PCa for eight validated DNA methylation biomarkers and Gleason score.

[0014] FIG. 6. Predictive performance of eight validated DNA methylation biomarkers for distinguishing metastatic-lethal PCa in models combining each CpG with Gleason score in the EV cohort.

[0015] FIG. 7. Primers used for pyrosequencing. All primers are listed in the 5′-3′ orientation.

[0016] FIG. 8. Correlation of pyrosequencing results with HM450 results.

[0017] FIGS. 9A, 9B. (9A) Selection model building using the 5 CpG markers validated by pyrosequencing. (9B) Fitted model results using the 5 CpG markers with Gleason score, compared to Gleason score alone.

### DETAILED DESCRIPTION

[0018] Prostate cancer (PCa) is a biologically and clinically heterogeneous disease with 220,800 new cases and 27,540 cancer-specific deaths expected in the U.S. for 2015 and over 300,000 deaths worldwide each year. PCa can be indolent (i.e., does not recur within 5 years of diagnosis and treatment, and may not cause problems even if left untreated) or can recur. These types of PCa are distinguished from metastatic-lethal PCa.

[0019] Currently, the single most important predictor of prognosis is Gleason score, which a pathologist assigns by histologic examination of biopsy tissue. However, Gleason score is frequently inaccurate, particularly when a small amount of tumor is available. By comparing the Gleason score of the diagnostic biopsy to subsequent prostatectomy, upgrading and downgrading occurs in 14% to 51% and 9%, respectively. Furthermore, while a tumor with Gleason score 3+3=6 is low-risk and Gleason score 4+4=8 or greater is high-risk, tumors that are 3+4 or 4+3 are heterogeneous and include the majority of tumors. Thus, research efforts are focused on finding prognostic biomarkers that can improve stratification of metastatic-lethal PCa from indolent PCa for targeting therapies to those patients most likely to benefit.

[0020] Recent biomarker studies have mostly focused on altered gene expression, leading to development of tests for mRNA signatures of tumor aggressiveness. Epigenetic alterations in tumor DNA may also provide valuable prognostic information. Epigenetics refers to changes in gene expression that are not due to mutations (i.e. changes in the sequence, such as loss or gain of nucleotides, of a gene). Thus, epigenetics is a reversible regulation of gene expression caused by several mechanisms other than mutation.

[0021] The most widely studied epigenetic modification is DNA methylation. Other epigenetic changes include changes to the three dimensional structure of DNA, histone protein modification, micro-RNA inhibitory activity, imprinting, X-inactivation, and long-distance chromosomal interaction.

[0022] DNA methylation occurs at CpG sites across the genome and regulates gene expression. Cytosine is one of a group of four building blocks (i.e., nucleotides) from which DNA is constructed (i.e. cytosine (C), thiamine (T), adenine (A), and guanosine (G)). The chemical structure of cytosine is in the form of a six-sided hexagon or pyrimidine ring. Cytosine can be paired with guanosine in a linear sequence along the single DNA strand to form 5′-CG-3′, or CpG pairs. “CpG” refers to a cytosine-phosphate-guanosine chemical bond in which the phosphate binds the two nucleotides together. In mammals, in 70-80% of these CpG pairs the cytosine is methylated. (Chatterjee, et al., Biochemica et Biophisica Acta 2012; 1819:763-70).

[0023] The term “CpG island” refers to regions in the genome with a high concentration of CG dinucleotide pairs or CpG sites. The length of DNA occupied by the CpG island is usually 300-3000 base pairs. The CpG island can be defined by various criteria including the length of recurrent CG dinucleotide pairs occupying at least 200 base pair (bp) of DNA, a CG content of the segment of at least 50%, and/or that the observed/expected CpG ratio is greater than 60%. There are an estimated 28-30 million CpG sites across the genome.

[0024] CpG islands are commonly found in gene promoters. Across mammals, an average of forty percent of gene promoters contain CpG islands (Fatemi, et al., Nucleic Acids Res. 2005; 33:e176). Gene promoters are particularly CG-rich in the human genome, as 70% of promoters in the human genome have high CG content. Although CpG islands are highly associated with gene promoters, CpG islands can also exist in other regions of the genome (such as in gene bodies or in intergenic regions).

[0025] In most CpG sites scattered throughout the DNA the cytosine nucleotide is methylated. In contrast, the cytosine is more often unmethylated in CpG sites located in the CpG islands of the promoter regions of genes, supporting a role of methylation status of cytosine in CpG islands in gene transcriptional activity.

[0026] Methylation of cytosine refers to the enzymatic addition of a methyl group or single carbon atom to position #5 of the pyrimidine ring of cytosine, which leads to the conversion of cytosine to 5-methyl-cytosine. The methylation of cytosine can be accomplished by a family of enzymes called DNA methyltransferases (DNMTs). The 5-methyl-cytosine, when formed, is prone to mutation or the chemical transformation of the original cytosine to form thymine. Five-methyl-cytosines account for 1% of the nucleotide bases overall in the normal human genome.

[0027] As indicated previously, the methylation status of cytosine throughout the DNA can be said to indirectly indicate the relative expression status of multiple genes throughout the genome. The methylation of cytosine nucleotides within a gene, particularly in the promoter region of the gene, is known to be a mechanism of controlling overall gene activity, i.e. mRNA and protein synthesis. Classically, the methylation of cytosine is associated with inhibition of gene transcription. However, in certain genes, methylation of cytosine is known to have the reverse effect and instead promotes gene transcription.

[0028] To date, studies of DNA methylation and PCa progression have been limited to small sets of candidate genes in relation to biochemical recurrence. Biochemical recurrence can be determined by measurement of the level of a PCa marker (i.e. prostate-specific antigen, PSA) in a patient's blood sample, wherein a PSA level above a certain threshold can indicate cancer recurrence. Hypermethylation of CpGs in the promoter region of PITX2 and GSTP1 was associated with PSA recurrence. Although patients with biochemical progression are at higher risk of PCa death, this is still a biologically heterogeneous group and most will not die from PCa. More particularly, studies of patients with biochemical recurrence after radical prostatectomy found that only 17% to 21.5% died of PCa after a median follow-up of 10 years.

[0029] For the current disclosure, epigenome-wide DNA methylation profiles in primary PCa were investigated. The study included a population-based radical prostatectomy cohort with long-term follow-up for metastatic progression and cancer-specific mortality. The goal of the disclosed study was to detect differentially methylated CpG biomarkers that distinguish patients with metastatic-lethal PCa from those with indolent, non-recurrent disease. The most robust methylation biomarkers identified were then tested in a validation cohort.

[0030] Strengths of the current study include its larger sample size, the epigenome-wide approach for biomarker discovery, and the population-based nature of the discovery cohort, with long-term follow-up of patients diagnosed with and treated for clinically localized PCa. Validation of the DNA methylation biomarkers in an independent patient cohort is also critical, and confirms that these CpGs have added value to Gleason score for predicting adverse outcomes.

[0031] The results described herein demonstrate that detecting DNA methylation biomarkers in primary tumor tissue obtained at surgical resection can distinguish metastatic-lethal PCa patients from those men at least five years post-radical prostatectomy without recurrence. Of the 42 top-ranked differentially methylated CpG sites that stratified patients with aggressive tumors in the discovery cohort, and improved the prognostic discrimination beyond that provided by Gleason score alone, eight were subsequently validated in an independent patient cohort.

[0032] The eight differentially methylated CpG sites validated in this study for the metastatic-lethal tumor phenotype are located in five genes (ALKBH5, ATP11A, FHAD1, KLHL8, and PI15) and three intergenic regions (referred to herein as “Intergenic 1”; “Intergenic 2” and “Intergenic 3”). The five genes are involved in regulatory functions, response to hypoxia, protein-binding, developmental processes, and ion transport. Dhanoa et al., Hum Genomics 7:13, 2013; Durocher et al., FEBS Lett 513:58-66, 2002; Falak et al., Physiol Genomics 46:418-28, 2014; Miyoshi et al., Oncol Rep 23:505-10, 2010; Thalhammer et al., PLoS One 6:e16210, 2011. The oxidative DNA demethylase ALKBH5, which is upregulated under hypoxia and also plays a role in spermatogenesis, belongs to the same gene family as ALKBH3 (PCa Antigen 1), which is highly expressed in prostate tumors and is a potential therapeutic target for PCa. Koike et al., Curr Cancer Drug Targets 12:847-56, 2012. In a previous study expression of ATP11A, which belongs to an extended family of adenosine triphosphate-binding cassette transporters, was associated with colorectal cancer death. Miyoshi et al., Oncol Rep 23:505-10, 2010. Another previous study found that PI15 (peptidase inhibitor 15) was amplified and overexpressed in some advanced prostate tumors. Vainio et al., Prostate 72:789-802, 2012. Aberrant DNA methylation of PI15 and ATP11A correlated with mRNA expression of these genes in the same patients' tumors. For PI15, the correlation was in the expected direction (i.e., promoter hypermethylation and reduced expression).

[0033] The methods and kits utilize differential methylation to distinguish metastatic-lethal PCa from indolent PCa. Metastatic-lethal PCa recurs, metastasizes and subsequently leads to death from PCa after initial diagnosis. Indolent PCa does not recur or relapse within 5 years of diagnosis and treatment.

[0034] In particular embodiments, differential methylation between metastatic-lethal PCa and indolent PCa is detected in one or more of: Intergenic 1 (e.g., CpG site: cg01135464); Intergenic 2 (e.g., CpG site: cg02223001); FHAD1 (e.g., CpG site: cg02394978); ALKBH5 (e.g., CpG site: cg07166550); KLHL8 (e.g., CpG site: cg16713292); ATP11A (e.g., CpG site: cg21513610); Intergenic 3 (e.g., CpG site: cg22501793); and PI15 (e.g., CpG site: cg24349665). In particular embodiments, differential methylation between metastatic-lethal PCa and indolent PCa is detected in all CpG sites within the disclosed genes and/or intergenic regions.

[0035] Particular embodiments detect differential methylation of Intergenic 1; Intergenic 2; FHAD1; ALKBH5; KLHL8; ATP11A; Intergenic 3; and PI15.

[0036] Particular embodiments detect differential methylation of Intergenic 1 CpG sites in combination with 1, 2, 3, 4, 5, 6 or 7 markers selected from Intergenic 2 CpG sites; FHAD1 CpG sites; ALKBH5 CpG sites; KLHL8 CpG sites; ATP11A CpG sites; Intergenic 3 CpG sites; and PI15 CpG sites.

[0037] Particular embodiments detect differential methylation of Intergenic 2 CpG sites in combination with 1, 2, 3, 4, 5, 6 or 7 markers selected from Intergenic 1 CpG sites; FHAD1 CpG sites; ALKBH5 CpG sites; KLHL8 CpG sites; ATP11A CpG sites; Intergenic 3 CpG sites; and PI15 CpG sites.

[0038] Particular embodiments detect differential methylation of FHAD1 CpG sites in combination with 1, 2, 3, 4, 5, 6 or 7 markers selected from Intergenic 1 CpG sites; Intergenic 2 CpG sites; ALKBH5 CpG sites; KLHL8 CpG sites; ATP11A CpG sites; Intergenic 3 CpG sites; and PI15 CpG sites.

[0039] Particular embodiments detect differential methylation of ALKBH5 CpG sites in combination with 1, 2, 3, 4, 5, 6 or 7 markers selected from Intergenic 1 CpG sites; Intergenic 2 CpG sites; FHAD1 CpG sites; KLHL8 CpG sites; ATP11A CpG sites; Intergenic 3 CpG sites; and PI15 CpG sites.

[0040] Particular embodiments detect differential methylation of KLHL8 CpG sites in combination with 1, 2, 3, 4, 5, 6 or 7 markers selected from Intergenic 1 CpG sites; Intergenic 2 CpG sites; FHAD1 CpG sites; ALKBH5 CpG sites; ATP11A CpG sites; Intergenic 3 CpG sites; and PI15 CpG sites.

[0041] Particular embodiments detect differential methylation of ATP11A CpG sites in combination with 1, 2, 3, 4, 5, 6 or 7 markers selected from Intergenic 1 CpG sites; Intergenic 2 CpG sites; FHAD1 CpG sites; ALKBH5 CpG sites; KLHL8 CpG sites; Intergenic 3 CpG sites; and PI15 CpG sites.

[0042] Particular embodiments detect differential methylation of Intergenic 3 CpG sites in combination with 1, 2, 3, 4, 5, 6 or 7 markers selected from Intergenic 1 CpG sites; Intergenic 2 CpG sites; FHAD1 CpG sites; ALKBH5 CpG sites; KLHL8 CpG sites; ATP11A CpG sites; and PI15 CpG sites.

[0043] Particular embodiments detect differential methylation of PI15 CpG sites in combination with 1, 2, 3, 4, 5, 6 or 7 markers selected from Intergenic 1 CpG sites; Intergenic 2 CpG sites; FHAD1 CpG sites; ALKBH5 CpG sites; KLHL8 CpG sites; ATP11A CpG sites; and Intergenic 3 CpG sites.

[0044] Particular embodiments can also exclude particular markers. For example, in particular embodiments, Intergenic 1 CpG sites are excluded. In particular embodiments, Intergenic 2 CpG sites are excluded. In particular embodiments, FHAD1 CpG sites are excluded. In particular embodiments, ALKBH5 CpG sites are excluded. In particular embodiments, KLHL8 CpG sites are excluded. In particular embodiments, ATP11A CpG sites are excluded. In particular embodiments, Intergenic 3 CpG sites are excluded. In particular embodiments, PI15 CpG sites are excluded. In particular embodiments, more than one marker is excluded, two or more markers are excluded, three or more markers are excluded, four or markers are excluded, five or more markers are excluded, 6 or more markers are excluded or 7 markers are excluded.

[0045] In particular embodiments when more than one marker is assayed, values of the detected markers can be calculated into a score. Each value can be weighted evenly within an algorithm generating a score, or the values for particular markers can be weighted more heavily in reaching the score. For example, markers with higher AUC or pAUC and/or methylation difference scores could be weighted more heavily than markers with lower AUC or pAUC and/or methylation difference scores. For example, in particular embodiments, Intergenic 1, KLHL8, and/or ATP11A may be weighted more heavily than other markers in a panel.

[0046] Markers may also be grouped into classes, and each class given a weighted score. For example, marker values for distinguishing metastatic-lethal PCa from indolent PCa may be grouped into classes and weighted as follows (from highest weight to lowest weight): Class 1: Intergenic 1, KLHL8, and ATP11A; Class 2: PI15 and FHAD1; and Class 3: Intergenic 2, ALKBH5, and Intergenic 3.

[0047] Any marker or class of markers can be included in a particular value calculation. For example, in particular embodiments, Class 1 is included. In particular embodiments, Class 2 is included. In particular embodiments, Class 3 is included. In particular embodiments, groups of classes can be included, for example, Classes 1 and 2; 1 and 3; and/or 2 and 3. Particular classes can also be excluded. For example, in particular embodiments, Class 1 is excluded. In particular embodiments, Class 2 is excluded. In particular embodiments, Class 3 is excluded.

[0048] Up (hyper)- or down (hypo)-methylation of the markers (e.g., methylation status) can be assessed by detecting methylation status and comparing a value to a relevant reference level. For example, the methylation status of one or more markers can be indicated as a value. The value can be one or more numerical values resulting from the assaying of a sample, and can be derived, e.g., by measuring methylation status of the marker(s) in the sample by an assay, or from a dataset obtained from a provider such as a laboratory, or from a dataset stored on a server.

[0049] In the broadest sense, the value may be qualitative or quantitative. As such, where detection is qualitative, the methods and kits provide a reading or evaluation, e.g., assessment, of whether or not the marker is methylated in the sample being assayed. In further embodiments, the methods and kits provide a quantitative detection of methylation, i.e., an evaluation or assessment of the actual amount or relative abundance of methylation of the marker in the sample being assayed. In such embodiments, the quantitative detection may be absolute or relative, if the method is a method of detecting methylation of two or more different markers in a sample. As such, the term “quantifying” when used in the context of quantifying methylation of a marker in a sample can refer to absolute or to relative quantification. Absolute quantification can be accomplished by inclusion of samples with known methylation parameters as one or more control markers and referencing, e.g., normalizing, the detected methylation level of the experimental marker with the known control markers (e.g., through generation of a standard curve). Alternatively, relative quantification can be accomplished by comparison of detected methylation levels or amounts between two or more different markers to provide a relative quantification of each of the two or more markers, e.g., relative to each other. The actual measurement of values for the markers can be determined using any method known in the art.

[0050] As stated previously, detected marker levels (e.g., values) can be compared to one or more reference levels. Reference levels can be obtained from one or more relevant datasets. A “dataset” as used herein is a set of numerical values resulting from evaluation of a sample (or population of samples) under a desired condition. The values of the dataset can be obtained, for example, by experimentally obtaining measures from sample(s) and constructing a dataset from these measurements. As is understood by one of ordinary skill in the art, the reference level can be based on e.g., any mathematical or statistical formula useful and known in the art for arriving at a meaningful aggregate reference level from a collection of individual datapoints; e.g., mean, median, median of the mean, etc. Alternatively, a reference level or dataset to create a reference level can be obtained from a service provider such as a laboratory, or from a database or a server on which the dataset has been stored.

[0051] A reference level from a dataset can be derived from previous measures derived from a population. A “population” is any grouping of subjects or samples of like specified characteristics. The grouping could be according to, for example, clinical parameters, clinical assessments, therapeutic regimens, disease status, severity of PCa, etc. In particular embodiments, a population is a group of subjects with metastatic-lethal PCa. In particular embodiments, a population is a group of subjects with indolent PCa.

[0052] In particular embodiments, conclusions are drawn based on whether a sample value is statistically significantly different or not statistically significantly different from a reference level. A measure is not statistically significantly different if the difference is within a level that would be expected to occur based on chance alone. In contrast, a statistically significant difference is one that is greater than what would be expected to occur by chance alone. Statistical significance or lack thereof can be determined by any of various methods well-known in the art. An example of a commonly used measure of statistical significance is the p-value. The p-value represents the probability of obtaining a given result equivalent to a particular datapoint, where the datapoint is the result of random chance alone. A result is often considered significant (not random chance) at a p-value less than 0.05.

[0053] In particular embodiments, values obtained based on the markers and/or other dataset components can be subjected to an analytic process with chosen parameters. The parameters of the analytic process may be those disclosed herein or those derived using the guidelines described herein. The analytic process used to generate a result may be any type of process capable of detecting indolent or metastatic-lethal PCa based on methylation status detection, for example, a linear algorithm, a quadratic algorithm, a decision tree algorithm, or a voting algorithm. The analytic process may set a threshold for determining the probability that a sample belongs to a given class. The probability preferably is at least 60%, at least 70%, at least 80%, at least 90%, at least 95% or higher. Detection relies on performing an assay on a biological sample, such as a primary PCa tumor sample.

[0054] The receiver operating characteristics (ROC) curve is a graph plotting sensitivity (true positive rate), which is defined in this setting as the percentage of metastatic-lethal PCa cases with a positive test or abnormal (differential) cytosine methylation level at a particular cytosine locus on the Y axis and false positive rate (1-specificity), i.e. the number of indolent (non-recurrent) PCa cases with abnormal (differential) cytosine methylation at the same locus on the X-axis. Specificity is defined as the percentage of normal (i.e., non-recurrent) cases with normal methylation levels at the locus of interest or a negative test. False positive rate refers to the percentage of normal (e.g., non-recurrent) subjects falsely found to have a positive test (i.e. abnormal or differential methylation levels).

[0055] The area under the ROC curves (AUC) indicates the accuracy of the test in identifying normal from abnormal cases (Hanley & McNeil, Radiology 1982; 143:29-36). The AUC is the area under the ROC plot from the curve to the diagonal line from the point of intersection of the X- and Y-axes and with an angle of incline of 45° (a test with no discrimination between two groups, e.g., metastatic-lethal vs. non-recurrent PCa cases, has a 45° diagonal line from the lower left to the upper right corner). The higher the area under the receiver operating characteristics (ROC) curve, the greater the accuracy of the test in predicting the condition of interest. An area ROC=1.0 indicates a perfect test, which is positive in all cases with the disorder (e.g, metastatic-lethal PCa) and negative in all normal individuals without the disorder (e.g., non-recurrent PCa). Thus, the closer the plot is to the upper left corner, the higher the overall accuracy of the test.

[0056] Methylation of the markers can be assessed using various methylation detection assays. A “methylation detection assay” refers to an assay, which can be commercially available, for distinguishing methylated versus unmethylated cytosine loci in DNA. Techniques for measuring cytosine methylation include bisulfite-based methylation assays. The addition of bisulfite to DNA results in the methylation of the unmethylated cytosine and its ultimate conversion to the nucleotide uracil. Uracil has similar binding properties to thiamine in the DNA sequence. Previously methylated cytosine does not undergo similar chemical conversion on exposure to bisulfite. Bisulfite assays can thus be used to discriminate previously methylated versus unmethylated cytosine.

[0057] Quantitative methylation detection assays include combined bisulfite and restriction analysis COBRA, which uses methylation sensitive restriction endonuclease, gel electrophoresis, and detection based on labeled hybridization probes. (Ziong and Laird, Nucleic Acid Res. 1997 25; 2532-4). Another exemplary detection assay is the methylation specific polymerase chain reaction PCR (MSPCR) for amplification of DNA segments of interest. This assay is performed after sodium bisulfite conversion of cytosine and uses methylation sensitive probes. Other detection assays include the Quantitative Methylation (QM) assay, which combines PCR amplification with fluorescent probes designed to bind to putative methylation sites; MethyLight™ (Qiagen, Redwood City, Calif.) a quantitative methylation detection assay that uses fluorescence based PCR (Eads, et al., Cancer Res. 1999; 59:2302-2306); and Ms-SNuPE, a quantitative technique for determining differences in methylation levels in CpG sites. As with other techniques, Ms-SNuPE also requires bisulfite treatment to be performed first, leading to the conversion of unmethylated cytosine to uracil while methyl cytosine is unaffected. PCR primers specific for bisulfite converted DNA are used to amplify the target sequence of interest. The amplified PCR product is isolated and used to quantitate the methylation status of the CpG site of interest. (Gonzalgo and Jones Nuclei Acids Res 1997; 25:252-31).

[0058] In particular embodiments, the Infinium® (Ilumina, Inc., San Diego Calif., USA) Human Methylation 450 Beadchip assay is used. The Ilumina assay can be used for genome wide quantitative methylation profiling. In particular embodiments, genomic DNA can be extracted from cells. Genomic DNA can be isolated and proteins or other contaminants can be removed from the DNA using proteinase K. The DNA can then be removed from the solution using available methods such as organic extraction, salting out, or binding the DNA to a solid phase support. As described above, and in the Infinium® Assay Methylation Protocol Guide, the DNA can be treated with sodium bisulfite, which converts unmethylated cytosine to uracil, while the methylated cytosine remains unchanged. The bisulfite converted DNA can then be denatured and neutralized. The denatured DNA can then be amplified. The next step uses enzymatic means to fragment the DNA. The fragmented DNA can then be precipitated using isopropanol and separated by centrifugation. The separated DNA can next be suspended in a hybridization buffer. The fragmented DNA can then be hybridized to beads that have been covalently limited to 50mer nucleotide segments at a locus specific to the cytosine nucleotide of interest in the genome. There are a total of over 500,000 bead types specifically designed to anneal to the locus where the particular cytosine is located. The beads are bound to silicon based arrays. There are two bead types designed for each locus, one bead type represents a probe that is designed to match to the methylated locus at which the cytosine nucleotide will remain unchanged. The other bead type corresponds to an initially unmethylated cytosine, which after sodium bisulfite treatment, is converted to uracil and ultimately a thiamine nucleotide. Unhybridized DNA (DNA not annealed to the beads) is washed away leaving only DNA segments bound to the appropriate bead and containing the cytosine of interest. If the cytosine of interest was unmethylated prior to the sodium bisulfite treatment, then it will match with the unmethylated or “U” bead probe. This enables single base extensions with fluorescent labeled nucleotide probes and generate fluorescent signals for that bead probe that can be read in an automated fashion. If the cytosine is methylated, single base mismatch will occur with the “U” bead probe oligomer. No further nucleotide extension on the bead oligomer occurs, thus preventing incorporation of the fluorescent tagged nucleotides on the bead. This will lead to low fluorescent signal from the “U” bead. The reverse will happen on the “M” or methylated bead probe.

[0059] Lasers are then used to stimulate the fluorophore bound to the single-base used for the sequence extension. The level of methylation at each cytosine locus is detected by the intensity of the fluorescence from the methylated compared to the unmethylated bead. Cytosine methylation level is expressed as “p” which is the ratio of the methylated-bead probe signal to total signal intensity at that cytosine locus.

[0060] In particular embodiments, reliable identification of specific cytosine loci distributed throughout the genome has been detailed in, for example, the document “CpG Loci Identification. A guide to Ilumina's method for unambiguous CpG loci identification and tracking for the GoldenGate® and Infinium® assays for Methylation”. Briefly, Illumina has developed a CpG locus identifier that designates cytosine loci based on the actual or contextual sequence of nucleotides in which the cytosine is located. It uses a similar strategy as used by NCBI's re SNP IPS (rs#) and is based on the sequence flanking the cytosine of interest. Thus a unique CpG locus cluster ID number is assigned to each of the cytosine undergoing evaluation. The system is consistent and not affected by changes in public databases and genome assemblies. Flanking sequences of 60 bases 5′ and 3′ to the CG locus (i.e. a total of 122 base sequences) is used to identify the locus. Thus a unique “CpG cluster number” or cg# is assigned to the sequence of 122 bp which contains the CpG of interest. Thus, only if the 122 bp in the CpG cluster is identical is there a risk of a locus being assigned the same number and being located in more than one position in the genome. Three separate criteria are utilized to track an individual CpG locus based on this unique ID system, chromosome number, genomic coordinate, and genome build. The lesser of the two coordinates “C” or “G” in CpG is used in the unique CG loci identification. The CG locus is also designated in relation to the first “unambiguous” pair of nucleotides containing either an ‘A’ or ‘T’. If one of these nucleotides is 5′ to the CG then the arrangement is designated TOP and if such a nucleotide is 3′ it is designated BOT.

[0061] In particular embodiments, pyrosequencing is used to detect marker methylation. Pyrosequencing is a method of DNA sequencing that relies on detection of the release of pyrophosphates as DNA is synthesized (and is therefore a “sequencing by synthesis” technique). To assess methylation by pyrosequencing, a DNA sample can be incubated with sodium bisulfite, which converts unmethylated cytosine to uracil. The presence of uracil will result in thymine incorporation during PCR amplification. Therefore, sequencing results that include thymine at a nucleotide position that is known to encode cytosine can be interpreted as unmethylated sites. In contrast cytosines present in the sequencing results indicate that the site was methylated in the original DNA sample, because methylation protects cytosine from conversion to uracil upon treatment. Bisulfite treatment can also be performed on control samples with known methylation patterns, to reduce or eliminate false positive results. Commercially available pyrosequencing machines include Pyro Mark Q96 (Qiagen, Hilden, Germany). For more details on methods to use pyrosequencing for measurement of methylation, see Delaney et al. Methods Mol Biol. 2015 1343: 249-264. Pyrosequencing is especially useful for detecting methylation in the CpG sites within genes.

[0062] In addition, the forward or reverse DNA strand is indicated as being the location of the cytosine being evaluated. The assumption is made that methylation status of cytosine bases within the specific chromosome region is synchronized (Eckhart, et al., Nat. Gent. 2006, 38:1379-85).

[0063] Measurement of mRNA levels transcribed by genes with altered cytosine methylation can also be assessed. Any technique for determining expression levels of mRNA can be used including Northern blot analysis, fluorescent in situ hybridization (FISH), RNase protection assays (RPA), microarrays, PCR-based, or other technologies for measuring RNA levels can be used.

[0064] Up (hyper)- or down (hypo)-methylation of genes also can be detected indirectly using, for example, cDNA arrays, cDNA fragment fingerprinting, cDNA sequencing, clone hybridization, differential display, differential screening, FRET detection, liquid microarrays, PCR, RT-PCR, quantitative RT-PCR analysis with TaqMan assays, molecular beacons, microelectric arrays, oligonucleotide arrays, polynucleotide arrays, serial analysis of gene expression (SAGE), and/or subtractive hybridization.

[0065] Further hybridization technologies that may be used are described in, for example, U.S. Pat. Nos. 5,143,854; 5,288,644; 5,324,633; 5,432,049; 5,470,710; 5,492,806; 5,503,980; 5,510,270; 5,525,464; 5,547,839; 5,580,732; 5,661,028; and 5,800,992 as well as WO 95/21265; WO 96/31622; WO 97/10365; WO 97/27317; EP 373 203; and EP 785 280.

[0066] Additionally, protein products of genes that are differentially methylated can be measured to indirectly assess cytosine methylation levels. Proteins translated from mRNA reflect the same phenomenon of altered gene expression related to changes in cytosine methylation. Therefore, protein expression could also be used to biologically classify a sample as metastatic-lethal or indolent PCa.

[0067] “Protein detection” includes detection of full-length proteins, mature proteins, pre-proteins, polypeptides, isoforms, mutations, post-translationally modified proteins and variants thereof, and can be detected in any suitable manner.

[0068] In particular embodiments, a protein marker is detected by contacting a sample with reagents (e.g., antibodies), generating complexes of reagent and marker(s), and detecting the complexes. Particular embodiments for detecting and measuring protein levels can use methods including agglutination, chemiluminescence, electro-chemiluminescence (ECL), enzyme-linked immunoassays (ELISA), immunoassay, immunoblotting, immunodiffusion, immunoelectrophoresis, immunofluorescence, immunohistochemistry, immunoprecipitation, mass-spectrometry, and western blot. See also, e.g., E. Maggio, Enzyme-Immunoassay (1980), CRC Press, Inc., Boca Raton, Fla.; and U.S. Pat. Nos. 4,727,022; 4,659,678; 4,376,110; 4,275,149; 4,233,402; and 4,230,797.

[0069] Nucleic acids and proteins can be linked to chips, such as microarray chips. See, for example, U.S. Pat. Nos. 5,143,854; 6,087,112; 5,215,882; 5,707,807; 5,807,522; 5,958,342; 5,994,076; 6,004,755; 6,048,695; 6,060,240; 6,090,556; and 6,040,138. Binding to nucleic acids or proteins on microarrays can be detected by scanning the microarray with a variety of laser or charge coupled device (CCD)-based scanners, and extracting features with software packages, for example, Imagene (Biodiscovery, Hawthorne, Calif.), Feature Extraction Software (Agilent), Scanalyze (Eisen, M. 1999. SCANALYZE User Manual; Stanford Univ., Stanford, Calif. Ver 2.32.), or GenePix (Axon Instruments).

[0070] Embodiments disclosed herein can be used with high throughput screening (HTS). Typically, HTS refers to a format that performs at least 100 assays, at least 500 assays, at least 1000 assays, at least 5000 assays, at least 10,000 assays, or more per day. When enumerating assays, either the number of samples or the number of protein or nucleic acid markers assayed can be considered.

[0071] Generally, HTS methods involve a logical or physical array of either samples, or the nucleic acid or protein markers, or both. Appropriate array formats include both liquid and solid phase arrays. For example, assays employing liquid phase arrays, e.g., for hybridization of nucleic acids, binding of antibodies or other receptors to ligand, etc., can be performed in multiwell or microtiter plates. Microtiter plates with 96, 384, or 1536 wells are widely available, and even higher numbers of wells, e.g., 3456 and 9600 can be used. In general, the choice of microtiter plates is determined by the methods and equipment, e.g., robotic handling and loading systems, used for sample preparation and analysis.

[0072] HTS assays and screening systems are commercially available from, for example, Zymark Corp. (Hopkinton, Mass.); Air Technical Industries (Mentor, Ohio); Beckman Instruments, Inc. (Fullerton, Calif.); Precision Systems, Inc. (Natick, Mass.), etc. These systems typically automate entire procedures including all sample and reagent pipetting, liquid dispensing, timed incubations, and final readings of the microplate in detector(s) appropriate for the assay. These configurable systems provide HTS as well as a high degree of flexibility and customization. The manufacturers of such systems provide detailed protocols for the various methods of HTS.

[0073] Disclosed kits include materials and reagents necessary to assay a sample for the methylation status of one or more markers disclosed herein. The materials and reagents can include those necessary to assay the markers disclosed herein according to any method described herein and/or known to one of ordinary skill in the art.

[0074] Various embodiments include materials and reagents necessary to perform methylation detection assays on particular epigenetic loci. Particular embodiments include materials and reagents necessary to assay for up- or down-methylation of a marker protein in a sample. In particular embodiments, the kits include antibodies to marker proteins and/or can also include aptamers (oligonucleotides or peptides that bind specific molecules), epitopes (regions of antigens recognized by an antibody, BCR or TCR), or mimitopes (molecules designed to mimic the binding properties of an epitope). Other embodiments additionally or alternatively include oligonucleotides that specifically assay for one or more marker nucleic acids based on homology and/or complementarity with marker nucleic acids. The oligonucleotide sequences may correspond to fragments of the marker nucleic acids. For example, the oligonucleotides can be more than 200, 175, 150, 100, 50, 25, 10, or fewer than 10 nucleotides in length. Collectively, any molecule (e.g., antibody, aptamer, epitope, mimitope, oligonucleotide) that forms a complex with a marker can be referred to as a marker binding agent herein.

[0075] Embodiments of kits can contain in separate containers marker binding agents either bound to a matrix, or packaged separately with reagents for binding to a matrix. In particular embodiments, the matrix is, for example, a porous strip. In particular embodiments, measurement or detection regions of the porous strip can include a plurality of sites containing marker binding agents. In particular embodiments, the porous strip can also contain sites for negative and/or positive controls. Alternatively, control sites can be located on a separate strip from the porous strip. Optionally, the different detection sites can contain different amounts of marker binding agents, e.g., a higher amount in the first detection site and lesser amounts in subsequent sites. Upon the addition of test sample, the number of sites displaying a detectable signal provides a quantitative indication of the amount of marker present in the sample. The detection sites can be configured in any suitably detectable shape and can be, e.g., in the shape of a bar or dot spanning the width (or a portion thereof) of a porous strip.

[0076] In particular embodiments the matrix can be a solid substrate, such as a “chip.” See, e.g., U.S. Pat. No. 5,744,305. In particular embodiments the matrix can be a solution array; e.g., xMAP (Luminex, Austin, Tex.), Cyvera (Illumina, San Diego, Calif.), RayBio Antibody Arrays (RayBiotech, Inc., Norcross, Ga.), CellCard (Vitra Bioscience, Mountain View, Calif.) and Quantum Dots' Mosaic (Invitrogen, Carlsbad, Calif.).

[0077] Particular embodiments can include control formulations (positive and/or negative), and/or one or more detectable labels. In particular embodiments, detectable labels that can be used for protein detection include radioactive isotopes or radiolabels (e.g., 32P and 13C), enzymes (e.g., luciferase, HRP and AP), dyes (e.g., rhodamine and cyanine), fluorescent tags or dyes (e.g., GFP, YFP, FITC), magnetic beads, or biotin. In particular embodiments, the detectable label is fluorescein, GFP, rhodamine, cyanine dyes, Alexa dyes, luciferase, and radiolabels, among others. Instructions for carrying out the assay, including, optionally, instructions for generating a score, can be included in the kit; e.g., written, tape, VCR, or CD-ROM.

[0078] In particular embodiments, the kits include materials and reagents necessary to conduct a methylation detection assay. In particular embodiments, the kits include materials and reagents necessary to conduct hybridization assays (e.g., PCR). In particular embodiments, the kits include materials and reagents necessary to conduct an immunoassay (e.g., ELISA). In particular embodiments, materials and reagents expressly exclude equipment (e.g., plate readers). In particular embodiments, kits can exclude materials and reagents commonly found in laboratory settings (pipettes; test tubes; distilled H2O).

[0079] The assayed sample can be any appropriate biological sample. In particular embodiments the sample is obtained from a subject diagnosed with PCa, and the sample includes the PCa. Cells and DNA from any biological sample(s) containing DNA can be used as a sample. Samples used for testing can be obtained from living or dead tissue and also archeological or forensic specimens containing cells or tissues. Exemplary samples include primary PCa tumor samples.

[0080] Particular embodiments disclosed herein include obtaining a sample from a subject having PCa; performing a methylation detection assay on the sample; determining one or more values based on the assaying; distinguishing metastatic-lethal PCa from indolent PCa based on the differential methylation status of a marker, as described elsewhere herein.

[0081] Particular embodiments also include predicting or diagnosing metastatic-lethal or indolent PCa in a subject by obtaining a sample from a subject suspected of having PCa; assaying the sample for methylation status of one or more markers disclosed herein; determining one or more marker values based on the assaying; comparing the one or more marker values to a reference level; and predicting or diagnosing metastatic-lethal or indolent PCa in the subject according to the methylation status of a marker as determined by the up- or down-regulation of the one or more markers, as described elsewhere herein.

[0082] A prediction or diagnosis according to the methods and kits disclosed herein can direct a treatment regimen. For example, a biological classification, prediction or diagnosis of metastatic-lethal PCa can direct a more aggressive or experimental treatment course. A classification, prediction or diagnosis of indolent PCa can direct a less aggressive or no further treatment course. Those of ordinary skill in the art classify treatments at a particular time as aggressive, experimental, moderate, minimal or “no” treatment based on a subject's prognosis and relevant standards and treatments at the time. For example, a treatment undergoing a clinical trial is an experimental treatment. Once the treatment is approved by a relevant regulatory agency within a jurisdiction, the treatment is no longer experimental in that jurisdiction.

[0083] In particular embodiments, the PCa epigenetic markers include one or more CpG methylation sites located in the gene FHAD1 (forkhead-associated (FHA) phosphopeptide binding domain 1). FHAD1 is a protein coding gene located on chromosome 1 of the human genome and is listed under Gene ID: 114827 in NCBI (see, e.g., SEQ ID NO: 1). In particular embodiments, differential methylation at CpG site cg02394978 in the FHAD1 gene is measured as an epigenetic marker of PCa (i.e, methylation levels at this CpG are lower in metastatic-lethal compared to indolent PCa).

[0084] In particular embodiments, the PCa epigenetic markers include one or more CpG methylation sites in the gene ALKBH5 (ALKB homolog 5). ALKBH5 is a gene that encodes a nucleic acid demethylase located on chromosome 17 and is listed under NCBI Gene ID: 54890 (see, e.g., SEQ ID NO: 2). In particular embodiments, methylation at CpG site cg07166550 in the ALKBH5 gene is measured as an epigenetic marker of PCa (i.e, methylation levels at this CpG are lower in metastatic-lethal compared to indolent PCa).

[0085] In particular embodiments, the PCa epigenetic markers include one or more CpG methylation sites in the gene KLHL8 (Kelch like family member 8), which encodes an adaptor protein involved in ubiquitination and is located on chromosome 4. KLHL8 is listed under NCBI Gene ID: 57563 (see, e.g., SEQ ID NO: 3). In particular embodiments, methylation at CpG site cg16713292 in the KLHL8 gene is measured as an epigenetic marker of PCa (i.e, methylation levels at this CpG are lower in metastatic-lethal compared to indolent PCa).

[0086] In particular embodiments, the PCa epigenetic markers include one or more CpG methylation sites in the gene ATP11A (ATPase, Class VI, type 11A), which is located on chromosome 13 and is listed under NCBI Gene ID: 23250 (see, e.g., SEQ ID NO: 4). In particular embodiments, methylation at CpG site cg21513610 in the ATP11A gene is measured as an epigenetic marker of PCa (i.e, methylation levels at this CpG are lower in metastatic-lethal compared to indolent PCa).

[0087] In particular embodiments, the PCa epigenetic markers include one or more CpG methylation sites in the gene PI15 (Peptidase Inhibitor), which is a gene encoding a membrane-bound ATPase located on chromosome 13. PI15 is listed under NCBI Gene ID: 51050 (see, e.g., SEQ ID NO: 5). In particular embodiments, methylation at CpG site cg24349665 in the PI15 gene is measured as an epigenetic marker of PCa (i.e, methylation levels at this CpG are higher in metastatic-lethal compared to indolent PCa).

[0088] In particular embodiments, the PCa epigenetic markers include one or more CpG methylation sites in Intergenic region 1. Intergenic region 1 is located on chromosome 17, in a region known as an open sea, meaning it is greater than 4 kb away from the nearest CpG island. In particular embodiments, methylation at CpG site cg01135464 in Intergenic region 1 is measured as an epigenetic marker of PCa (i.e, methylation levels at this CpG are higher in metastatic-lethal compared to indolent PCa).

[0089] In particular embodiments, the PCa epigenetic markers include one or more CpG methylation sites in Intergenic region 2. In particular embodiments, methylation at CpG site cg02223001 in Intergenic region 2 is measured as an epigenetic marker of PCa (i.e, methylation levels at this CpG are higher in metastatic-lethal compared to indolent PCa).

[0090] In particular embodiments, the PCa epigenetic markers include one or more CpG methylation sites in Intergenic region 3. Intergenic region 3 is located on chromosome 1, in a region known as a shore, meaning it is adjacent to or less than 2 kb away from the nearest CpG island. In particular embodiments, methylation at CpG site cg22501793 in Intergenic region 3 is measured as an epigenetic marker of PCa (i.e, methylation levels at this CpG are higher in metastatic-lethal compared to indolent PCa).

[0091] The disclosure is not limited to the particularly referenced gene and associated nucleic acid and protein sequences but instead also encompasses sequences including 80% sequence identity; 81% sequence identity; 82% sequence identity; 83% sequence identity; 84% sequence identity; 85% sequence identity; 86% sequence identity; 87% sequence identity; 88% sequence identity; 89% sequence identity; 90% sequence identity; 91% sequence identity; 92% sequence identity; 93% sequence identity; 94% sequence identity; 95% sequence identity; 96% sequence identity; 97% sequence identity; 98% sequence identity or 99% sequence identity to a gene sequence referenced herein.

[0092] “% sequence identity” refers to a relationship between two or more sequences, as determined by comparing the sequences. In the art, “identity” also means the degree of sequence relatedness between sequences as determined by the match between strings of such sequences. “Identity” (often referred to as “similarity”) can be readily calculated by known methods, including those described in: Computational Molecular Biology (Lesk, A. M., ed.) Oxford University Press, NY (1988); Biocomputing: Informatics and Genome Projects (Smith, D. W., ed.) Academic Press, NY (1994); Computer Analysis of Sequence Data, Part I (Griffin, A. M., and Griffin, H. G., eds.) Humana Press, NJ (1994); Sequence Analysis in Molecular Biology (Von Heijne, G., ed.) Academic Press (1987); and Sequence Analysis Primer (Gribskov, M. and Devereux, J., eds.) Oxford University Press, NY (1992). Preferred methods to determine sequence identity are designed to give the best match between the sequences tested. Methods to determine sequence identity and similarity can be found in publicly available computer programs. Sequence alignments and percent identity calculations may be performed using the Megalign program of the LASERGENE bioinformatics computing suite (DNASTAR, Inc., Madison, Wis.). Multiple alignment of the sequences can also be performed using the Clustal method of alignment (Higgins and Sharp CABIOS, 5, 151-153 (1989) with default parameters (GAP PENALTY=10, GAP LENGTH PENALTY=10). Relevant programs also include the GCG suite of programs (Wisconsin Package Version 9.0, Genetics Computer Group (GCG), Madison, Wis.); BLASTP, BLASTN, BLASTX (Altschul, et al., J. Mol. Biol. 215:403-410 (1990); DNASTAR (DNASTAR, Inc., Madison, Wis.); and the FASTA program incorporating the Smith-Waterman algorithm (Pearson, Comput. Methods Genome Res., [Proc. Int. Symp.] (1994), Meeting Date 1992, 111-20. Editor(s): Suhai, Sandor. Publisher: Plenum, New York, N.Y. Within the context of this disclosure, it will be understood that where sequence analysis software is used for analysis, the results of the analysis are based on the “default values” of the program referenced. “Default values” mean any set of values or parameters which originally load with the software when first initialized.

[0093] Moreover, the term “gene” can include not only coding sequences but also regulatory regions such as promoters, enhancers, and termination regions. The term further can include all introns and other DNA sequences spliced from the mRNA transcript, along with variants resulting from alternative splice sites. Portions of complete gene sequences can be referenced as is understood by one of ordinary skill in the art.

[0094] The Exemplary Embodiments and Examples below are included to demonstrate particular embodiments of the disclosure. Those of ordinary skill in the art should recognize in light of the present disclosure that many changes can be made to the particular embodiments disclosed herein and still obtain a like or similar result without departing from the spirit and scope of the disclosure.

### Exemplary Embodiments

[0095] 1. A method to distinguish metastatic-lethal prostate cancer (PCa) from indolent PCa including:

[0096] obtaining a tumor tissue sample;

[0097] detecting methylation status of cytosines located in one or more epigenetic loci selected from Intergenic 1, Intergenic 2, FHAD1, ALKBH5, KLHL8, ATP11A, Intergenic 3, and PI15;

[0098] and

[0099] distinguishing metastatic-lethal PCa from indolent PCa based on the detecting.

2. A method of embodiment 1 wherein the cytosines are part of CpG pairs.
3. A method of embodiment 2 wherein the CpG pairs are within CpG islands.
4. A method of embodiment 1 or 2 wherein the cytosines are within CpG site: cg01135464; CpG site: cg02223001; CpG site: cg02394978; CpG site: cg07166550; CpG site: cg16713292; CpG site: cg21513610; CpG site: cg22501793; and/or CpG site: cg24349665,
5. A method of embodiment 1 or 2 wherein the cytosines are all cytosines within CpG pairs within the selected gene or intergenic region.
6. A method of any of embodiments 1-5 wherein a reference level is derived from a population of subjects with indolent PCa.
7. A method of embodiment 6 wherein up-regulation of methylation status at Intergenic 1, Intergenic 2, Intergenic 3, and/or PI15 as compared to the reference level distinguishes the sample as metastatic-lethal PCa.
8. A method of embodiment 6 wherein lack of a statistically-significant difference in methylation status at Intergenic 1, Intergenic 2, Intergenic 3, and/or PI15 as compared to the reference level distinguishes the sample as indolent PCa.
9. A method of embodiment 7 or 8 wherein down-regulation of methylation status at FHAD1, ALKBH5, KLHL8, and/or ATP11A as compared to the reference level distinguishes the sample as metastatic-lethal PCa.
10. A method of embodiment 6 or 8 wherein lack of a statistically-significant difference in methylation status at FHAD1, ALKBH5, KLHL8, and/or ATP11A as compared to the reference level distinguishes the sample as indolent PCa.
11. A method of any of embodiments 1-5 wherein the reference level is derived from a population of subjects with metastatic-lethal PCa.
12. A method of embodiment 11 wherein down-regulation of methylation status at Intergenic 1, Intergenic 2, Intergenic 3, and/or PI15 as compared to the reference level distinguishes the sample as indolent PCa.
13. A method of embodiment 11 wherein lack of a statistically-significant difference in methylation status at Intergenic 1, Intergenic 2, Intergenic 3, and/or PI15 as compared to the reference level distinguishes the sample as metastatic-lethal PCa.
14. A method of embodiment 11 or 12 wherein up-regulation of methylation status at FHAD1, ALKBH5, KLHL8, and/or ATP11A as compared to the reference level distinguishes the sample as indolent PCa.
15. A method of embodiment 11 or 13 wherein lack of a statistically-significant difference in methylation status at FHAD1, ALKBH5, KLHL8, and/or ATP11A as compared to the reference level distinguishes the sample as metastatic-lethal PCa.
16. A method of any of embodiments 1-15 wherein the method includes detecting methylation status of cytosines located in Intergenic 1; Intergenic 2; FHAD1; ALKBH5; KLHL8; ATP11A; Intergenic 3; and PI15.
17. A method of any of embodiments 1-15 wherein the method includes detecting methylation status of cytosines located in Intergenic 1 and the methylation status of cytosines located in one or more of Intergenic 2; FHAD1; ALKBH5; KLHL8; ATP11A; Intergenic 3; and PI15.
18. A method of any of embodiments 1-15 wherein the method includes detecting methylation status of cytosines located in Intergenic 2 and the methylation status of cytosines located in one or more of Intergenic 1; FHAD1; ALKBH5; KLHL8; ATP11A; Intergenic 3; and PI15.
19. A method of any of embodiments 1-15 wherein the method includes detecting methylation status of cytosines located in FHAD1 and the methylation status of cytosines located in one or more of Intergenic 1; Intergenic 2; ALKBH5; KLHL8; ATP11A; Intergenic 3; and PI15.
20. A method of any of embodiments 1-15 wherein the method includes detecting methylation status of cytosines located in ALKBH5 and the methylation status of cytosines located in one or more of Intergenic 1; Intergenic 2; FHAD1; KLHL8; ATP11A; Intergenic 3; and PI15.
21. A method of any of embodiments 1-15 wherein the method includes detecting methylation status of cytosines located in KLHL8 and the methylation status of cytosines located in one or more of Intergenic 1; Intergenic 2; FHAD1; ALKBH5; ATP11A; Intergenic 3; and PI15.
22. A method of any of embodiments 1-15 wherein the method includes detecting methylation status of cytosines located in ATP11A and the methylation status of cytosines located in one or more of Intergenic 1; Intergenic 2; FHAD1; ALKBH5; KLHL8; Intergenic 3; and PI15.
23. A method of any of embodiments 1-15 wherein the method includes detecting methylation status of cytosines located in Intergenic 3 and the methylation status of cytosines located in one or more of Intergenic 1; Intergenic 2; FHAD1; ALKBH5; KLHL8; ATP11A; and PI15.
24. A method of any of embodiments 1-15 wherein the method includes detecting methylation status of cytosines located in PI15 and the methylation status of cytosines located in one or more of Intergenic 1; Intergenic 2; FHAD1; ALKBH5; KLHL8; ATP11A; and Intergenic 3.
25. A method of any of embodiments 1-15 wherein the method includes detecting methylation status of cytosines located in one or more of ALKBH5, FHAD1, KLHL8 and PI15 and wherein the methylation status improves the prognostic discrimination of a Gleason score (e.g., by improving ROC score).
26. A method of embodiment 25 wherein the Gleason score is <=6, a 3+4=7 or a 4+3=7, or 8-10 Gleason score.
27. A method of any of embodiments 1-26 wherein the sample is obtained from a subject.
28. A method of any of embodiments 1-27 wherein the sample is a primary PCa tumor sample.
29. A method of any of embodiments 1-28 wherein methylation status is defined by a mean β difference (e.g., see FIG. 4) or a β difference.
30. A method of embodiment 25 wherein the mean β difference or β difference is (+) or (−).
31. A method of any of embodiments 1-5, 7, 9, 11, 13, 15, or 16-30 wherein biological classification as metastatic-lethal PCa directs an aggressive or experimental treatment.
32. A method of any of embodiments 1-6, 8, 10, 12, 14, or 16-30 wherein biological classification as indolent PCa directs moderate, minimal, or no treatment.
33. A method of any of embodiments 1-32 wherein the detecting includes assaying using a bisulfite based methylation assay.
34. A method of any of embodiments 1-33 wherein the detecting includes assaying using pyrosequencing.
35. A kit for distinguishing metastatic-lethal PCa from indolent PCa including reagents to detect methylation status of cytosines located in one or more epigenetic loci selected from Intergenic 1, Intergenic 2, FHAD1, ALKBH5, KLHL8, ATP11A, Intergenic 3, and PI15.
36. A kit of embodiment 35 wherein the reagents detect methylation status of cytosines that are part of CpG pairs.
37. A kit of embodiment 36 wherein the reagents detect methylation status of cytosines that are part of CpG pairs within CpG islands.
38. A kit of embodiment 35 or 36 wherein the reagents detect methylation status of cytosines within CpG site: cg01135464; CpG site: cg02223001; CpG site: cg02394978; CpG site: cg07166550; CpG site: cg16713292; CpG site: cg21513610; CpG site: cg22501793; and/or CpG site: cg24349665.
39. A kit of embodiment 35 or 36 wherein the reagents detect methylation status of cytosines within all CpG pairs within the selected gene or intergenic region.
40. A kit of any of embodiments 35-39 including a reference level.
41. A kit of embodiment 40 wherein the reference level is derived from a population of subjects with indolent PCa.
42. A kit of embodiment 41 wherein up-regulation of methylation status at Intergenic 1, Intergenic 2, Intergenic 3, and/or PI15 as compared to the reference level distinguishes the sample as metastatic-lethal PCa.
43. A kit of embodiment 41 wherein lack of a statistically-significant difference in methylation status at Intergenic 1, Intergenic 2, Intergenic 3, and/or PI15 as compared to the reference level distinguishes the sample as indolent PCa.
44. A kit of embodiment 41 or 42 wherein down-regulation of methylation status at FHAD1, ALKBH5, KLHL8, and/or ATP11A as compared to the reference level distinguishes the sample as metastatic-lethal PCa.
45. A kit of embodiment 41 or 43 wherein lack of a statistically-significant difference in methylation status at FHAD1, ALKBH5, KLHL8, and/or ATP11A as compared to the reference level distinguishes the sample as indolent PCa.
46. A kit of embodiment 40 wherein the reference level is derived from a population of subjects with metastatic-lethal PCa.
47. A kit of embodiment 46 wherein down-regulation of methylation status at Intergenic 1, Intergenic 2, Intergenic 3, and/or PI15 as compared to the reference level distinguishes the sample as indolent PCa.
48. A kit of embodiment 46 wherein lack of a statistically-significant difference in methylation status at Intergenic 1, Intergenic 2, Intergenic 3, and/or PI15 as compared to the reference level distinguishes the sample as metastatic-lethal PCa.
49. A kit of embodiment 46 or 47 wherein up-regulation of methylation status at FHAD1, ALKBH5, KLHL8, and/or ATP11A as compared to the reference level distinguishes the sample as indolent PCa.
50. A kit of embodiment 46 or 49 wherein lack of a statistically-significant difference in methylation status at FHAD1, ALKBH5, KLHL8, and/or ATP11A as compared to the reference level distinguishes the sample as metastatic-lethal PCa.
51. A kit of any of embodiments 35-50 wherein the kit includes reagents to detect methylation status of cytosines located in Intergenic 1; Intergenic 2; FHAD1; ALKBH5; KLHL8; ATP11A; Intergenic 3; and PI15.
52. A kit of any of embodiments 35-50 wherein the kit includes reagents to detect methylation status of cytosines located in Intergenic 1 and methylation status of cytosines located in one or more of Intergenic 2; FHAD1; ALKBH5; KLHL8; ATP11A; Intergenic 3; and PI15.
53. A kit of any of embodiments 35-50 wherein the kit includes reagents to detect methylation status of cytosines located in Intergenic 2 and methylation status of cytosines located in one or more of Intergenic 1; FHAD1; ALKBH5; KLHL8; ATP11A; Intergenic 3; and PI15.
54. A kit of any of embodiments 35-50 wherein the kit includes reagents to detect methylation status of cytosines located in FHAD1 and methylation status of cytosines located in one or more of Intergenic 1; Intergenic 2; ALKBH5; KLHL8; ATP11A; Intergenic 3; and PI15.
55. A kit of any of embodiments 35-50 wherein the kit includes reagents to detect methylation status of cytosines located in ALKBH5 and methylation status of cytosines located in one or more of Intergenic 1; Intergenic 2; FHAD1; KLHL8; ATP11A; Intergenic 3; and PI15.
56. A kit of any of embodiments 35-50 wherein the kit includes reagents to detect methylation status of cytosines located in KLHL8 and methylation status of cytosines located in one or more of Intergenic 1; Intergenic 2; FHAD1; ALKBH5; ATP11A; Intergenic 3; and PI15.
57. A kit of any of embodiments 35-50 wherein the kit includes reagents to detect methylation status of cytosines located in ATP11A and methylation status of cytosines located in one or more of Intergenic 1; Intergenic 2; FHAD1; ALKBH5; KLHL8; Intergenic 3; and PI15.
58. A kit of any of embodiments 35-50 wherein the kit includes reagents to detect methylation status of cytosines located in Intergenic 3 and methylation status of cytosines located in one or more of Intergenic 1; Intergenic 2; FHAD1; ALKBH5; KLHL8; ATP11A; and PI15.
59. A kit of any of embodiments 35-50 wherein the kit includes reagents to detect methylation status of cytosines located in PI15 and methylation status of cytosines located in one or more of Intergenic 1; Intergenic 2; FHAD1; ALKBH5; KLHL8; ATP11A; and Intergenic 3.
60. A kit of any of embodiments 35-59 including reagents to perform a bisulfite-based methylation assay.
61. A kit of embodiment 35-60 further including reagents to perform pyrosequencing.
62. A kit of any of embodiments 35-61 including probes and silicon based arrays to perform a methylation assay.
63. A kit of embodiment 62 wherein the probes include beads.
64. A kit of embodiment 63 wherein the beads allow a detectable label to be bound.
65. A kit of any of embodiments 35-64 including proteins and/or nucleotide sequences that bind to one or more proteins encoded by, and/or one or more nucleotide sequences corresponding to, one or more of Intergenic 1; Intergenic 2; FHAD1; ALKBH5; KLHL8; ATP11A; Intergenic 3; and PI15.
66. A kit of any of embodiments 35-65 including a DNA nucleotide sequence and/or a RNA nucleotide sequence.
67. A kit of embodiment 66 wherein the proteins include antibodies, epitopes, or mimitopes.
68. A kit of any of embodiments 35-67 including a detectable label.
69. A kit of embodiment 68 wherein the detectable label is a radioactive isotope, enzyme, dye, fluorescent dye, magnetic bead, or biotin.
70. A kit of any of embodiments 35-69 including bisulfate and PCR primers specific for bisulfite-converted DNA.
71. A kit of any of embodiments 35-70 including DNA-fragmenting enzymes.
72. A kit of any of embodiments 35-71 including hybridization buffer.
73. A kit of any of embodiments 35-72 including target-specific probes for CpG pairs within any of SEQ ID NOs: 1-5.
74. A kit of any of embodiments 35-73 including beads with target-specific probes for CpG pairs within CpG site: cg01135464; CpG site: cg02223001; CpG site: cg02394978; CpG site: cg07166550; CpG site: cg16713292; CpG site: cg21513610; CpG site: cg22501793; and/or CpG site: cg24349665.
75. A kit of any of embodiments 35-74 including one or more nucleotides including one or more of SEQ ID NOs: 6-29.
76. A method or kit to improve the prognostic determination of a Gleason score including practicing a method or using a kit of any of embodiments 1-75.

[0100] Examples. Methods. Study Subjects. Fred Hutchinson (FH) Cancer Research Center Cohort. The FH cohort includes 510 European-American PCa patients who underwent radical prostatectomy as primary therapy for clinically localized adenocarcinoma of the prostate. These patients were previously enrolled in population-based studies. Agalliu et al., Am J Epidemiol 168:250-60, 2008; Stanford et al., Cancer Epidemiol Biomarkers Prev 8:881-6, 1999. The first study included men ages 40-64 years who were diagnosed between January 1993 and December 1996, and in the second study, men were ages 35-74 years and were diagnosed between January 2002 and December 2005. Gleason score, diagnostic PSA, and tumor stage were collected from the Seattle-Puget Sound Surveillance, Epidemiology, and End Results Program cancer registry. Vital status and underlying cause of death were also obtained from the cancer registry, and cause of death was confirmed by review of death certificates. PCa recurrence status was determined from prospectively collected information from follow-up surveys that were completed by patients in 2004-2005 and in 2010-2011, review of medical records, and/or physician follow-up as needed. Metastatic progression was confirmed by positive bone scan, MRI, CT or biopsy. PCa-specific deaths included those with underlying cause of death attributed to ICD-9 code 180.0 or ICD-10 code C61.9. Patients who developed metastases or died from PCa were combined in a lethal phenotype category. Over a mean follow-up of 8.2 years, 317 patients had no evidence of recurrence and 113 had recurred, including 27 metastatic-lethal events; recurrence status was unknown for 80 men. For the present analysis, the lethal phenotype patients were compared to patients who had not recurred. The FH Institutional Review Board approved the study and all participants signed informed consent statements.

[0101] Eastern Virginia (EV) Medical School Cohort. The validation cohort included 80 patients diagnosed with localized stage PCa who underwent radical prostatectomy at EV Medical School. The cohort included men who experienced disease progression to metastatic or lethal PCa (n=31) and patients with no evidence of recurrence for five or more years after diagnosis (n=49) who were matched based on diagnosis years (1992-2009). Metastatic-lethal events were identified as described in the FH cohort, and all patients were European-Americans. The patients in the EV cohort were followed for outcomes on average for 9.0 years.

[0102] Tumor Tissue Sample Preparation and DNA Extraction. Formalin-fixed paraffin-embedded prostate tumor tissue blocks were obtained from radical prostatectomy specimens for both cohorts and used to make hematoxalin and eosin stained slides, which were reviewed by pathologists to confirm the presence and location of adenocarcinoma. For each patient two 1-mm tumor tissue cores from the dominant lesion that were enriched with 75% tumor cells were taken for DNA purification. The RecoverAll Total Nucleic Acid Isolation Kit (Ambion/Applied Biosciences, Austin, Tex.) was used to extract DNA, which was then quantified with PicoGreen, aliquoted onto 96-well plates and shipped to Illumina (Illumina, Inc., San Diego, Calif.) for DNA methylation profiling.

[0103] DNA Methylation Profiling. The EZ DNA Methylation Kit (Zymo Research, Irvine, Calif.) was used to bisulfite convert tumor DNA samples. Controls on the array were used to track the bisulfite conversion efficiency. The Infinium® HumanMethylation450 BeadChip (Illumina) was used to measure epigenome-wide methylation using beads with target-specific probes designed to interrogate individual CpG sites (>485,000). Bibikova et al., Genomics 98:288-95, 2011. Samples from the FH cohort were assayed as one batch (7 plates) and the EV samples were assayed as a second batch (2 plates). Across the 96-well plates, blind duplicate (FH, n=16; EV, n=7) and replicate (FH, n=2; EV, n=3) samples were incorporated for each cohort. All plates also contained Illumina controls and two negative controls. PCa outcome events were randomly distributed across plates, and laboratory personnel were blinded to the location of duplicate and replicate samples.

[0104] Data Processing. Failed samples were identified by using the detection P-value metric according to Illumina protocols. A sample was excluded if less than 95% of the CpG sites for that sample on the array were detected with a detection P-value <0.05, resulting in removal of 31 FH and 15 EV samples. The final number of patients in the FH cohort and EV cohort was 327 (303 non-recurrent, 24 metastatic-lethal) and 65 (41 non-recurrent, 24 metastatic-lethal), respectively. Further, CpG sites with a detection P-value of >0.01 were excluded. After data filtering, 478,998 CpGs were available in the FH cohort and 479,103 in the EV cohort (477,460 overlapped). Correlation coefficients for duplicate samples in the FH and EV cohorts were 0.96-0.99 and 0.99, respectively. The correlation coefficients for replicate samples in FH and EV were 0.99 and 0.98.

[0105] Gene Expression Profiling. The same patients' tumor samples were used for mRNA expression profiling using the Whole-Genome DASL® HT Assay (Illumina). Transcript correlations between duplicated samples (19 pairs) ranged from 0.96 to 0.99. In addition, replicate tumor RNA samples (6 pairs) were included, and the transcript correlations across plates were 0.95-0.99. There were 353 patients with DNA methylation and mRNA expression data.

[0106] Statistical Analysis. Batch effects were removed using Combat (Johnson et al., Biostatistics 8:118-27, 2007), and the methylation data were normalized using subset-quantile within array normalization (Bioconductor minfi). Maksimovic et al., Genome Biol 13:R44, 2012. Methylation β- and M-values were calculated where β-values represent the percentage of DNA methylation at a CpG site. Methylation M-values are the logit transformed β-values that are normally distributed. M-values were used for statistical testing and β-values to represent methylation differences between patient groups. Genome annotation of the CpGs was based on the Illumina protocol. Hansen, IlluminaHumanMethylation450kanno.ilmn12.hg19: Annotation for Illumina's 450 k methylation arrays. R package version 0.2.1. DNA methylation biomarkers for prognosis were identified using the FH cohort. First, for all individual CpG sites, the AUC and partial AUC (pAUC) for predicating metastatic-lethal versus non-recurrent PCa were calculated. The pAUC evaluates performance at fixed high (95%) specificity as selection of biomarkers with a low false-positive rate was the aim. The top 4% of markers based on pAUC and the top 1% based on AUC were selected, yielding 22,290 CpGs for further analysis.

[0107] Next, the biomarkers that showed the greatest improvement in predicting metastatic-lethal PCa compared to Gleason score alone were identified. Because Gleason score is the most widely used measure of tumor aggressiveness, identification of CpGs that could improve the prognostic discrimination of patients beyond that provided by Gleason score was the aim. Other potential prognostic classifiers were also considered including age at diagnosis, diagnostic PSA, and pathologic stage, but these factors did not improve the prediction of metastatic-lethal PCa compared to models with Gleason score only (P>0.05), and were therefore not considered in further analyses.

[0108] A logistic regression model for metastatic-lethal versus non-recurrent PCa was fit containing Gleason score as the only predictor. Based on that model, forward model selection was done using three selection criteria: AUC, pAUC (95% specificity), and P-value (Wald test). For each criterion, the CpG that showed the greatest improvement or was the most significant in predicting metastatic-lethal PCa compared to the base model with Gleason score alone was identified; the identified biomarker was then added to the model with Gleason score. Forward selection was continued, each time selecting one additional CpG to be included in the model, until a pre-specified stopping criterion was met; for AUC this was an increment of AUC <0.005; for pAUC this was an increment of pAUC <0.0005; and for P-value this was >0.05. This entire process was repeated 100 times with bootstrap samples. The biomarkers that were selected multiple times in the different bootstrap cohorts (≥3 when considering AUC; when considering pAUC; ≥4 when considering P-value) were chosen for further evaluation.

[0109] The methylation biomarkers that were most predictive for metastatic-lethal disease in the FH cohort were then tested in the EV (validation) cohort. For each biomarker the AUC and pAUC (95% specificity) for metastatic-lethal versus non-recurrent PCa was calculated. P-values for AUC and pAUC were computed using 10,000 permutations, and 95% confidence intervals for AUC and pAUC were calculated using 2,000 stratified bootstrap replicates. Likelihood ratio tests were also computed to compare models fit with Gleason score and a CpG biomarker compared to a model with Gleason score only. All statistical analyses were conducted using R.

[0110] Results. There was no difference in mean age between patients with metastatic-lethal PCa compared to those who did not recur in either cohort (FIG. 1). In both cohorts, Gleason score, pathological stage, and PSA at diagnosis were higher in men with the lethal phenotype relative to men with no evidence of recurrence (all P-values <0.01).

[0111] FIG. 2 shows the 42 DNA methylation biomarkers that were most predictive for metastatic-lethal PCa in the FH cohort. These CpGs were identified based on their ability to improve the prognostic discrimination beyond Gleason score alone (FIG. 3), and a subset of the CpG biomarkers were validated in the EV cohort (FIG. 2, asterisks). Half of the 42 biomarkers showed higher methylation in metastatic-lethal PCa compared to non-recurrent disease (FIG. 2). The 42 biomarkers had a mean methylation difference between patient groups (metastatic-lethal vs. non-recurrent) that ranged from 1% to 22% (average=6.1%), and pAUC and AUC values for metastatic-lethal PCa ranged from 0.0063 to 0.0181 and 0.539 to 0.844, respectively. DNA methylation levels of the 42 biomarkers were not strongly correlated (all pairwise r2<0.5).

[0112] The 42 top-ranked biomarkers were next evaluated in the EV cohort. For 30 of the CpGs, the difference in methylation level between metastatic-lethal vs. non-recurrent PCa was in the same direction in the EV as in the FH cohort. Eight of these biomarkers demonstrated a significant AUC or pAUC in the EV cohort (P-value <0.05; FIG. 4). One of the biomarkers had both a significant AUC and pAUC (ATP11A cg21513610). The CpG with the largest mean methylation difference was cg01135464. The biomarker with the highest AUC was KLHL8 cg16713292 (0.753), and the largest pAUC was for ATP11A cg21513610 (0.0085). Whether methylation levels of these CpGs were correlated with methylation levels of adjacent CpGs in the same gene or intergenic region was next investigated. For five of the CpGs the methylation levels were correlated (pairwise r²>0.5) with methylation levels of nearby CpG sites (79 of 347 CpGs in ATP11A; 1 of 33 CpGs in FHAD1; 3 of 6 CpGs in PI15; 2 of 2 CpGs near cg01135464 [Chr. 17, OpenSea]; and 1 of 2 CpGs near cg22501793 [Chr. 1, S_Shore]). FIG. 5 shows the ROC curves for each of the eight biomarkers alone, and combined with Gleason score.

[0113] FIG. 6 shows the performance of the eight validated biomarkers evaluated for classifying metastatic-lethal PCa when combined with Gleason score. The AUC for Gleason score alone in the EV cohort was 0.816. This is higher than what has been reported in other studies and likely reflects the study design, which involved selecting metastatic-lethal patients and a group of patients without evidence of recurrence. Gleason score had a pAUC for metastatic-lethal PCa of 0.0101. Likelihood ratio tests were then performed comparing the model with Gleason score only to a model that included both Gleason score and one of the eight CpGs. This test was significant for four of the CpGs (P<0.05): ALKBH5 (cg07166550), FHAD1 (cg02394978), KLHL8 (cg16713292), and PI15 (cg24349665), providing further evidence that they are complementary to Gleason score for the prognostic discrimination of patients.

[0114] In a final analysis tumor mRNA expression profiles were evaluated. For two of the five genes that encompassed a validated biomarker, DNA methylation levels were significantly correlated with transcript levels: ATP11A (Pearson r²=−0.29, P=2.78E-18) and PI15 (Pearson r²=−0.28, P=5.77E-08). ATP11A cg21513610 is located in the gene body, whereas cg24349665 is in the promoter region of PI15.

[0115] Technical validation of the markers was performed using pyrosequencing. Primers used for the pyrosequencing-based DNA methylation assay are shown in FIG. 7. First, methylation assay results were compared to the results obtained using the HM450 technique. The pyrosequencing results highly correlated with the HM450 results for the five CpG markers within genes (FIG. 8), indicating that pyrosequencing is a technique that can be used for the disclosed methods and kits for distinguishing metastatic-lethal and indolent PCa. Model training was conducted using the FH and EV cohorts and tested using samples from a University of Michigan cohort, and the selection order of each of the markers in the model was based on Log likelihood and LR Test p values for each marker, which are shown in FIG. 8. Next, forward model building with the Gleason score was performed for the five CpGs that were validated, and all five CpGs were selected into the model (FIG. 9A). The fitted model results are shown in FIG. 9B. The AUC for the model plus Gleason score was 0.89, which was higher than the AUC for Gleason score alone (0.87). These data demonstrate the utility of the markers, and indicate that pyrosequencing is a technique that can be utilized to assay for DNA methylation to help distinguish between indolent and metastatic-lethal PCa.

[0116] The methylation status of the epigenetic markers disclosed herein was detected and confirmed using two distinct assay types—the HM450 array and pyrosequencing.

[0117] As will be understood by one of ordinary skill in the art, each embodiment disclosed herein can comprise, consist essentially of or consist of its particular stated element, step, ingredient or component. Thus, the terms “include” or “including” should be interpreted to recite: “comprise, consist of, or consist essentially of.” As used herein, the transition term “comprise” or “comprises” means includes, but is not limited to, and allows for the inclusion of unspecified elements, steps, ingredients, or components, even in major amounts. The transitional phrase “consisting of” excludes any element, step, ingredient or component not specified. The transition phrase “consisting essentially of” limits the scope of the embodiment to the specified elements, steps, ingredients or components and to those that do not materially affect the embodiment. As used herein, a material effect would cause a statistically-significant reduction in ability to detect metastatic-lethal or indolent PCa in a subject based on detecting methylation status of the CpG sites identified herein.

[0118] In the context of nucleotide sequences, “reagents to detect”, “target specific probes” and “specific for” mean that the nucleotide sequences interact with target sequences (or sequences related to the target sequence based on the particular assay) with sufficient specificity and strength to reliably detect methylation status of cytosines within the targeted sequence. Particular nucleotide sequences with these characteristics can be readily generated and identified by those of ordinary skill in the art, based on the teachings of the current disclosure and with reference to numerous publicly available resources and databases.

[0119] Unless otherwise indicated, all numbers expressing quantities of ingredients, properties such as molecular weight, reaction conditions, and so forth used in the specification and claims are to be understood as being modified in all instances by the term “about.” Accordingly, unless indicated to the contrary, the numerical parameters set forth in the specification and attached claims are approximations that can vary depending upon the desired properties sought to be obtained by the present invention. At the very least, and not as an attempt to limit the application of the doctrine of equivalents to the scope of the claims, each numerical parameter should at least be construed in light of the number of reported significant digits and by applying ordinary rounding techniques. When further clarity is required, the term “about” has the meaning reasonably ascribed to it by a person skilled in the art when used in conjunction with a stated numerical value or range, i.e. denoting somewhat more or somewhat less than the stated value or range, to within a range of ±20% of the stated value; ±19% of the stated value; ±18% of the stated value; ±17% of the stated value; ±16% of the stated value; ±15% of the stated value; ±14% of the stated value; ±13% of the stated value; ±12% of the stated value; ±11% of the stated value; ±10% of the stated value; ±9% of the stated value; ±8% of the stated value; ±7% of the stated value; ±6% of the stated value; ±5% of the stated value; ±4% of the stated value; ±3% of the stated value; ±2% of the stated value; or ±1% of the stated value.

[0120] Notwithstanding that the numerical ranges and parameters setting forth the broad scope of the invention are approximations, the numerical values set forth in the specific examples are reported as precisely as possible. Any numerical value, however, inherently contains certain errors necessarily resulting from the standard deviation found in their respective testing measurements.

[0121] The terms “a,” “an,” “the” and similar referents used in the context of describing the invention (especially in the context of the following claims) are to be construed to cover both the singular and the plural, unless otherwise indicated herein or clearly contradicted by context. Recitation of ranges of values herein is merely intended to serve as a shorthand method of referring individually to each separate value falling within the range. Unless otherwise indicated herein, each individual value is incorporated into the specification as if it were individually recited herein. All methods described herein can be performed in any suitable order unless otherwise indicated herein or otherwise clearly contradicted by context. The use of any and all examples, or exemplary language (e.g., “such as”) provided herein is intended merely to better illuminate the invention and does not pose a limitation on the scope of the invention otherwise claimed. No language in the specification should be construed as indicating any non-claimed element essential to the practice of the invention.

[0122] Groupings of alternative elements or embodiments of the invention disclosed herein are not to be construed as limitations. Each group member can be referred to and claimed individually or in any combination with other members of the group or other elements found herein. It is anticipated that one or more members of a group can be included in, or deleted from, a group for reasons of convenience and/or patentability. When any such inclusion or deletion occurs, the specification is deemed to contain the group as modified thus fulfilling the written description of all Markush groups used in the appended claims.

[0123] Certain embodiments of this invention are described herein, including the best mode known to the inventors for carrying out the invention. Of course, variations on these described embodiments will become apparent to those of ordinary skill in the art upon reading the foregoing description. The inventor expects skilled artisans to employ such variations as appropriate, and the inventors intend for the invention to be practiced otherwise than specifically described herein. Accordingly, this invention includes all modifications and equivalents of the subject matter recited in the claims appended hereto as permitted by applicable law. Moreover, any combination of the above-described elements in all possible variations thereof is encompassed by the invention unless otherwise indicated herein or otherwise clearly contradicted by context.

[0124] Furthermore, numerous references have been made to patents, printed publications, journal articles and other written text throughout this specification (referenced materials herein). Each of the referenced materials are individually incorporated herein by reference in their entirety for their referenced teaching.

[0125] In closing, it is to be understood that the embodiments of the invention disclosed herein are illustrative of the principles of the present invention. Other modifications that can be employed are within the scope of the invention. Thus, by way of example, but not of limitation, alternative configurations of the present invention can be utilized in accordance with the teachings herein. Accordingly, the present invention is not limited to that precisely as shown and described.

[0126] The particulars shown herein are by way of example and for purposes of illustrative discussion of the preferred embodiments of the present invention only and are presented in the cause of providing what is believed to be the most useful and readily understood description of the principles and conceptual aspects of various embodiments of the invention. In this regard, no attempt is made to show structural details of the invention in more detail than is necessary for the fundamental understanding of the invention, the description taken with the drawings and/or examples making apparent to those skilled in the art how the several forms of the invention can be embodied in practice.

[0127] Definitions and explanations used in the present disclosure are meant and intended to be controlling in any future construction unless clearly and unambiguously modified in the following examples or when application of the meaning renders any construction meaningless or essentially meaningless. In cases where the construction of the term would render it meaningless or essentially meaningless, the definition should be taken from Webster's Dictionary, 3^{rd} Edition or a dictionary known to those of ordinary skill in the art, such as the Oxford Dictionary of Biochemistry and Molecular Biology (Ed. Anthony Smith, Oxford University Press, Oxford, 2004).

The application's sequence listing, which the Patent Office published only in electronic form, follows.

SEQUENCE LISTING (29 sequences)

SEQ ID NO: 1 - DNA, 163682 bp, Homo sapiens
tgagaagatgtaaggactggagctgcagcagtctttctgggaccattatacagagattctgtctgaggttggatccacgtggtcaaaagtattgctgaggagccagagagagactgaggtctgatgacatcacttgagccctgcagacttttcatttacggtaaccagttaatttgctttcatgctgaagctagtttgaactgggctctgatatggtttggctgtgtctgcaaccaaatctcatcttgaattgtagttcccataatccacacatgtcgtggaagggacccagtgggaggtaattgagtcatgagggcggttaccctcgtgctgttctcttgacagtgagtgagttcttggagacgtgatggttttataaggggctttccccttttgcttggcactgctccttgctgccgccatgttaagagggacgcgtttgcttccccttccaccatgatcgtaagtttcctgaggcctcccttgccctgcagaactgtgagtcaattaaacctctttccttcataaattacccagtctcaggcagctctttatagcagcataagcatggactaatacaggctctttatcactccacagaaagaggctgtatcctccatcaactagttgaaagtattttaacacactgtgaaagccaaagaaacatggaggctgactgtggccttcagtttgcagtctcagcacctggccctgcctccctctgtcccacggttgcgtagcctccctcattccccatcttccagctcttgttcccactgctccttcctcctgcaatgcctttctcttccttctctccctcctgaaatcctacccatccttcaagacccaggtcaagtgattcctttttctcaaagcccttcctgaccccacaagctccaccccacgtggaagcacgtccctccctctccaaccccagcccctcagcccctggtgagcactcggcccttctactgagaatcctagtgacccaggaacattactgtcccccttgtttcttgacaacgattcaaattcagagccagattagaagggacaatctttgagacttaagtttcaaaaaacaatcagttcttaggagaggtcagaaaacacggtgaaaggtgaggatttgggtaaagtatcagaaagaaaagaacagttgttctcgagaaaagagagagtctgtgttgagtgctgtaaggaaggcagaaaaactggacatgtttagaccaaataaaatgattcagaggaaacctgagaagaaatgtccagcgtgaggggattgatcagctcagaaaggaagatcagcagcgagcgatggggatgacctgaaacaaaagcaaaatgcctaagataggagcactgttggccaggcgcggtggctcatgcctgtaatcccagcactttgggaggctgacatgggcagatcacgacgtcaggagtccgagaccagcctgacccctggtaaaaccctgtctctactaaaaatataaaaattagacaggcatggtggcgcacacctgtaaccccagctactcaggaggctgaggcaggagaattgcttgaacccgggaggcagaagttatagtgagccgagactgcaccactgcactccagcctgggcaatagagtgagactccatctcaaggaaaaaaaaaaaaaaaaaaaggagcactgttgaaatgagaagagaatgcagatggcagtgagatgctacaaaacctccagaaacccagagaggtgacaagggctgaggtcatctcaaactagaccaacagggaggcctgctgttgattggaagcagctttctcaaaaggtaggaatcatgttggcttgctgttgatggaaactcagggccaccaaggccttctggaatttgctattcaataaacagacacaagggagggcacaggaggccaagcagtggctagatgtgccaaaagagccaccataagtcaaaggacaaagtgagcaggggtgtcagcttataagccaccccaggcagagactgtctctcttctcacttcctaaaccctgccaagcaccacagagccttgtacacagcccctgtgcctccttccccaggcccaactgtttctttataggataaatcaactaccccagaccacgtccaatcaaagaggctcttaacctttgctggggagaagtctggttaaggctctgggccctctttccagaaaaatacacataggcccagacacatcaaagcttcctcccaatttcagtggttcacaccttccctgaggccaccagtaggtcttcttggacaatagtcctaaactccttcattcatttactttaagagacgggggtctcactaagtcacccaggcaggagtgcagtggcatgatcatagctcactgcagccttgaactcctgggctgatgcaatcctcctgcctcagcctccagagtagctgagactacaagtgtgtgccaccatatccagctaacttttttattttttgtaaaagcaaggtctgtctatgttgcctatgctggttcaaactcctgggctgacatgatcctctcacctcagcctcccaaagtgctgggattacaggcatgagctaccatgctcagcccctaaactcattcatttatttaaatccttattgaatgttggctgcatgtcaggtactgctctgagcaccagggatgcttgggtgaacaagaaaaggatggccgggtgcactgggccatgcctgtaatcccagcactttgagaggccgaggtgggcggatcacttgaggtcaggagtttgagaccagcctggccaacatggtgaaaccccgtctctactaaaaatacaacaaattagccagatgtggtggtgcatgcctgtggttccagctacttgggaggctgaggcaggggaatcgcttgaacctgggaggcggaggtcacagtgagccgagactgtgccactgcacttcagcctgagtgacagagcgagactctgtctcaaaagaaaaacaaaaagaacaacaaagaaccttcaccacatggagtgtagcttccaggttatatcccagccatccaacaatcagaaagtctggaggtacagcccaggaacagtgattctgacatggggccaggtttaggacctcctgttccaaggaactcctggtcaaactccttctgtaagtagagaggggagagtaatatttgaaggcatgtgctgcgactcaagtattcatgcactgctggggggtgtagattggtaccagcgctttggaaaaatgtttgtcagaatcttttaaagctgaacatctgctgaatctgcaactcagcacctctattcctaggtctatatctaatagacatgtgcacatatgcataccaacggacatacacagtggcgcccaattacctctggtgttcacacctctgtggtatcctctcccttgagtcggggcaggacctgtaacttattttaagctgtagaatacagcaaaggtgatgggatgtaatttctgtgattatgttacataagattataacttccatctctctattgagagtctactgggggtccagagtcgcagactctgtctactgactcttactgactttgatgaggcaagccaacttccagaaaggcccacatggcaagaaactgagggtgagctcagctaatacccagcaaggagctgaggctctctttctgataccctcaaaaaaacgaatcttaccaataacaatgtgagcttgaaactggatccagccaggtgtagtggctcatgcctgtaatctcagcactttggtagtccaaggtgggaggatcgcttgagcccgggagttcaagacaagcctgggcaacatagtgagatctcatctctattaaaaataaaaattaaaaaaataggcttagtggtacatggctgtggtcccagctactcaggaggctgaggtgggagggacacttgagcctgggaaatcaaggctgcagtgagttacgatcacatcactgcactcccagcctggacaacaggagagaccctgtctcaaaaaaaaaaaaaaaaagaaagaaaaagaaaaaagaaagcagatcgggccgggcgtggtggctcatgcctgtaatcccagcactttgggaggccgaggagggtggatcacaaggtcaggagtttgagatcagcctggccaatatggtgaaaccccttctccactaaaaacacaaaaattagccaggggtggtggcacttgcctgtagtcccagctactcgggaggctgaggcagaagaatcgcttgaacctgggaggcagaggttgcagtgagccaagatcatgccactgcactccagccaggctgacagagcgagactctatctcaaaaaaaaaaaaaaaaaaaagaaagaaagaaagaaagcagatgcagatttatccccagttgaggctcagatgagatcccagcttggccagctccttgattgcagcctgtgagaccctaaagcacaggaccgtgctgagccctgcccaattcctgacccacagaatctgtgagatgataaatgtgggttgttttgagctgctaagtttgtggtagtttgttaagcagcaattgataaccaatacaatggaatacgacagagcaatgagaatgaatgaaccacagctacttgaagagacatgcttgactttgggagatgaaaagacatctcccaaacataacgtcaagcgaaagaaaccagacagaagatggaatttgtaggatcccatttacataaagttcaaaaacaaacagaactggccaggcgcagtggctcacgcctataatcccagcactgtgggaggtgaggcgggtggatcacctgaggtcaggagttcgacttccggaccaacattgtgaaaccccacctatattaaaatacaaaaattagctgggcatggtagcaggtgcctgtaatcccagctacttgggaggctgaggtaggagaatcacttgaacacgggaggcagaggttgcagtgagatcatatcatggcactctaccctgggtgataagagcaaaagtcttgtctcaaaaaaaacaaacaacaaaaaaacaaacaaacaaaaaaaacccagaacgaatctatgacattagcagtcaggataggggctaccccagggggtgggtcatgactggaaggggtcacagggagacttctaggagtgctggtgatgttttgcttcttgatctggattctggttaggtgggtgagtacacttagtaaaaattcaaatggtgtctcagcccatttgtaatgctataaagtgcaattatgacctgagacaaaatgtatattttcaatatgtatattatcttcgataaaaagtttacaaaaaggccgggtgcagtggctcacgcctctaatcccagcactctgggaagctgaggcgggtggatcacgaggtcaggagatcgagaccagcctggccaacatggtgaaaccccgtctctactaaaaatacaaaaagtagccgggcatggtggcgtgtggctgtagtcccagctactcaggcggctgaagcaggagaatcgcttgaacccgggaggaggaggttgcagtgagccgagatcgcaccactgcactccagcctgggcaacagagcaagactccatctaaaaaaaaaaaaaaaaaaaaaagtttacaaaaagtacagcactttgtaatctggcagccagagtttgaattccagaaccaccatgtgcaagatttgtaactggttaagttacttgacttttctgtgcctcaatttctctttctgtataatgagttgggctaagaactaaataaaactgtgcatgacatggtggttggtaccttgttagctttaataaatatgagctgaatttgttaaccacattcataaaggttcactgtcactcaaaaaaatatagtgaaggtttgcccacatgcctggaagtagaatttatggagttgtccagcaggtgccaccccatagagactgctgggttcccaagaatcacctctagttgtgactagaggaaggagcacatcctatctcttatatccatatccacatatagaaaggtctcagagcagccggccagataatatgagactagtcatccagagatcaggtttgttctggagtaggactgagtcttgatgcaaatcaaagtttctccagagtgtttgtgacctgggttgagattggggctctcttcgcacagcatcagagaaaaagaaaacaggcaataatcgtaaacactcatagagccattcagttgtaccagccactgatccattgtttcatacgtcttaacccatttaatcctttcaataaaatggattgttgtatacccattttacaggtgagggaagtgaggcacaaacaaaatacaacaaaaaccaggcccaggacaggtggggccagcacactttgcagtttttgaacggatggtacagacagacccccccacagcaaagcgcaaggaaccaaggggaactgactttgaaaaatgatttgcaagataactgaatgctccaaaccagcatgaaagagtcgacatgagacgaagctccatattttctcattttctgccacgggaaaaggcaaggatggctgcagaaagcctcagttgccagttattctctccatggtttgaaattattttcatgagtctctgtgtgtaggtctgtatataaaaatctgtactttctaagcttatatggtcaggttactaatgggccgtggagtctctagtgggccctctgctctctgtcatccgtcaccctgcgcaacagcttggctatttcctgcactctttactctcttgttcttgctctttctctggctctctttcatgccatagaggctgaggaagcctccacacctctcctggccgcggctggggcctgaagccagcattcatttcatgttggaatgcaagggcagcaggagaaacatcacacagttctctgaggatggagcacagggttaggctctccccaggcaagaacagcccagagaaggtggctgggaaggaatgagattttacgggggcagaagttctgcaggaacgaagcctagtgcccaatgtcagcaggtaatgtgggtggcaggcctaagctgcctcctctgggcttatgcccccttcactccctgccctgggcactgcctgaacctttggacagacaagagtgcaggctgctcagaagtgagagaaagcagttgtgagtaagtggcatcttgtgattgtgacagctgtcacctgtagttccccaggggaaataccttccttgtcacattcatctcgattcaaatcctgccagattttctagctgtgtgactttaggcagatttctccctgtctctgagccttatttcctacaatatgggcttcgtcgtcaccaagagttcaataaaaggttaactgtaggcactgccaagaagcacaagtaatctagaaacatctatttttttttttcagggacagtatttttaatgccgcatcactgtttaattgcaatgtacaactctcttactcagcccaggaaattatatcataaaaccctaagttattgggtatttgattttctgtttttgaaatgaaaatggatgatacggaattgggtttcaagaactttgcacacccttgagataacagtggcatcctgagggacagaggatccaattaagatttggcaacttcggctccactgattctgagtgtcagctttgctctcagtttaggattttttgtttttcattgagatatcagctaacagcaacagatgatctctcaaagcctggtgaggggcatgggctgttccagctcatggccagcctgggtttcactggggtctgtctgatagcaagtttgtgtcctgggttcatgttaatgacaagagtttgaccaaagacaagcatggaggggtggtggtagggatggaggtggtgttcaggcctgggcaggggactagagaagccgacatcctggggcgaggacaggtcagcccagcagtcctcagaggacaggaggccgggcttcagaagggtggcaggggcttccccctgcatatttattcattcagacattgttctagggactggtggcacagcagcaaacaaaacatgaaaaaagaaattcctgctttcatggagtttagattctaccaggggtcagggagggagacacaataaataacataaataaataaagaaatagtatgtgagttgatgataagtgatgtattagtccatttgtgttgctatcaagtaatacctgaggctgtgtcatttatccagaaaagaggtttatttggctcacagttctgcaggttgtacaagaagcatggtgccagcatctgcctctggtgagggtctcaggctgcttccactcctggcagaaagtagcgcctgcatgtgcagagatcacatgatgagagaggaagtgagagtgagcgagggggaggtgccaggctctttctaacaatcagctctttaggaaactgatagagtgagaactcatgcaccctacaggaacagcaccaagccatccatgagggattcgcccgcatgatccaagcacctcccgccaggccccacctccaacactgaggagcaaatttcaacatgagatttggaggggtcaaatattctaactatagcaagtggcaaaaagaagggaagagggatagagtgttgaggtttttattttgtttggatgtgcttttgttgttcttatttttatttgcttttgttgttcttatttttatttgcttttgctgttcttattgtttttatttgctcttttttgttgtttattagatttcatggtggttgtttcattgtttcaaaaaaccaattttagaaaagatgatatgtgagtaaaaagctaaagtaaagaaggcaaaggagactcttgaggggaagtgcattccaggcagaggaatgggcaagagcaaaggctctgaggcagaaacgtgtgggaagctgagcttgaccctctctgttcctgtgaagccatcacttgggtcccagcccttgtggtccctcctaacattttacgcctagaatctttctggttgtaggaaactgatccaggcagaaccttccagactgagggcctggaagagatttgtagggacaggctccgggagaggtctctgcagttcagctgcataaatcagggttttgtcaagcttgttgcaaatgcacattcctggattatgtcccaggcctgctaaatcagaatctctggggtctgtgcccagaagtccgcatttctaaaagcctccaggcacgtttgagcatcttcactgtatattccaccacaaatcgatgtccatgatttctctctcagatcctcttcctattgactaggtgtattagtctgttctcacactgctataaagtaattccttgagactgaataatttacaaagaaaagaagtttaattgactcacagttctgcactgctagggaggcctcaggaaacttacagttatggcggaaggccaaggggaagcaaggaagctagcatgttgtaacatggtgtagcaggagagagagagagcaaagggggaagtgccacacttttaaaccatcagatctcatgagaactcactcgctatcatgagaaaagcaagcgggaagtctgcccccatgattcaatcacctcccaccaggcccctcttccaacacgtggggagtgcaattcgagatgaaatttgggtggggacacacagccaaaccgtatcactagggtagaatgtgccatagttcatctctcttagaaaaacgtttagagtttttcttgaggtgtctggtcagccatttcctgccagtgaaaggaatcactctccaggtagagtcagcaggagataggatttcctgctggagatagtggcgggagataggatttgcacatctgctcaacacactccatcccgcgagtcctgtgccggctgacaagcggtttcttaaggacagtaactgttccaggtgtattctgggatcagcgtgtgacactcataggactcaaaagatgtttgcagagatagagaaagggcaaaagaatgaataaatgtcactcttaacagggaggagcagaggcagcaggattgtgagtttggaaatattttttccccagcacatggaagaaatcctcattctttcaaaatttttcattccaccccatccctttcccaatccccaccccactcccagagatcccctcttcttactctttctattttctggcctgtaacggaaaggactagagatttgggtagggcagggggcatactaacctccaagggtctcatgagttcagctccatcaatctcctacctctccctatcgcccccgaccctccctcaacgcatccagcttacagtgaggggtaatggaaaggattcttgaatcaaatctcctccctgctccttcctcgctgtaaaaccttgggccatttctgtgacctctgagcctccgctttcctatctgtgaaatggggcaggctcgtggggcctggagcattcagcaggcggtaacccagtgggcgttccctgcacggtgccacgccccctctgccgcgcaggccacgccctcatctattaggctggaccccgcggcgcctggcggcgttgccatggcaacgcgcgtacacaggccggccgggcgggcggggtgccgggtgcgagctggagactccgcgggagcgcggccgggaggcttcgccccggagctggcccgacgcctcccgagctggcagggctctcggcggaggtcggagcgtgggcttcctcctcccgccaggtgagtgcggcgcgggaaggggtggcgggccgagaccggggaccggaaggggcggcccagcgaggactagccctggcaggaggaggggtggctccccggccccatcctcctggatccaggctccggtccccaggagcaccccagtagctaccccaacaccagcccctcctttccagatgcaggccccaccccgcccgcggaggaagcccccgggagccttagaccctccttggcaccagccatgccactctgggaagtcctgggggttacagctgggattaggaggggcatccctgctgcccctgacttacgaacgacacccacccggcggtcagagagactccccccttgcctaacctctcccttcccaaatacaacactgaggaatttctagggctcccaggccacttaagatctggtaacccctcaacagaaattttgcttctctatctcacttgtgacctataagcagggagtgcagatgcctgaagctcttttgctcttttgcatggtcggtgccctgtgtcttagaactaatttacagagtttaacgcatctaatcactttctacagtgttttcaggtaggaaagtgactgcacagggcaagattaaagtggggaaatagggcccaacccattcagctaaagaaatagacttttttttttttttccagaatgtcatctaggataaatactgaaggggaaaatgaaaggtagttactgtcagaggttcttaggctaccctgacttacttttaagcattgttttgtactttcattcattcatgatttactgagcaccactatgtgtcaggcatggcagcgctgggggccagaggggagtaatgaacagactgtgaggaaatgcaaagggtctgagatttttacactacttgcaagctaagttagcctgccactgcttaatgatgctagcagaagaccagagactccaggaccagagacaaaggatgttattactcacagcacagcaggcactgtgagctcatgtttgcgttggttccccttgccctgcaagtaccccggggtgatgcaggacagctcaggtggatgctgtgcacactgcgagtctgtttcccagctaaggaaccccaagctcaggaaactccagtcttttaaaaggggctgctagccagtgcccaacctttgccctggaaggagatgaccttttttttttttttttaattgagacagagtcttgctctgtctcccaagctagatagagtgcagtggcacaatctcagctcactgcaacctctgctgcacggtttcaagtgattctcctgcctcagacttccgattagctgggactacaggtgcaagccaccatgcccggctaatttttttgtgtttttagtagagacagggtttcgccatgttggccaggctggtctcaaactcctgacctcaggtgatccgtccacctgggcctcccaaagtgctaggattacaggcatgagccaccgtgcccagccagagatgacatttttatcataaatctgcactctgccctggatagggacactatccctatcctctcaggatatttgccctacagatgtccttggaagattgtctggaacaaaatctgtcagtgtctttgctctgaagatgggtacaaacacaggaaacccatggagaattgagtttaacaaaaacaacacagtttgggctctcttggaacgtatctcagtgaaagggaaacagtaaacagctaagtaaagaacaagaaaatgacagagaatgataagctcaaggaaggagccacagcagtgacacatgctagctagacaacaaagtgactggtgacgcctttagctggggtggtcaggtagctaccgcaaggcaccagctgtggaaacatcggggggaagagctaaaaaaaaaaaaaaagccagtcattcagatttggggttttactctggaggcatttcctgtggctttcccacaaaagagacatttctcgaaagttgactttagattacttttactttagtttggatgtggtgcttgatgatgtagtcctctgcaattgaagattaataactcaggcaatttgagggcaacagggcatggttcttttggaaaaagaagtgtctttttatccctattaaagacagcagacttaaaaataaaattctcattatatgaaagtattaatatttctgaggatttctcataggcttcggaatttacaaacataaactatctggcttgtttttatttctcttactcccaagggtcttttctttttttgcagaggatagaattctggtgttaagggctatctgttatttcatgtcctaagtgtcaacaaaacagtgacaaccccactatcccaagtgacaacctctccctccccccactcagtcactctctctgctcccccatcccatcccctccccacccagcagtgatggaggtgtgaaaagttgagctgcctgaggattatgtagtggtgacatgcaatggcaatctccctgcccgaatgctaggggaccttaacctctctgcatctcagtctccttttctgtaaagtagggacaataatgacacccaccttgcagggtttctctgaggatgaaaagagtatattcaaggaaaagtgcctggcacttactaaggactccataaatgatgatagagatgatgatgaaaagcagagccagccccgagagtccgtaccaccacaactagttgatttttgtttttacccatagtccaataatttgtcatttcactgacttttcaattgaatggaaaagagagagactgttgttgttctttgacaaggaattgaggtggaggatatcacactgcatctttagacgtaatctcaaatcggattcaagcatcgagatgaattactgtcaatattttagaactttctgaagtcactgaagtgtttgtcttaaaagatgtgtatagaacttatttcgaaatgcaccacaatataaaatggatggacacacggatagatggaaagatctgtgataaagcaaatatggcaaaatgccgatggtagaatctagtggtgggtacataggagctcattatctgcttctttcagcctctctgtatgtttgacatttttatagtaaaatgctggggggaatactgtgcagggtcctgattacatggctgagctataatcttgatattttgcctttagaagtaatcttttttcccctaactaaataaatgaagaaatacagcgatttaaaaagaaaaacatcatctaatgcctgcctctccaatgataactctttaagaaactccaaaagcagacatggtggtgtgcctgtattcctagctactctggaggctgaggcaggaggatcagttgagcccaagagttcaagactgcagcgagctatgattgtgccactgaactcagcctgggcaaagagcaagacctcatctctaaatatgaatgaatgaataaaataagctctatagaagtttagggttccttggatcagagtttgagaagcccaggttaacaacactaataagagtagtacaaatgagtgttcagtgtgtgccaggcaccattctagatacctcacgtatattattgcatttaacccattttaggctgggtgtggtggctcctgtctgtaatcccagcactttgggaggccaaggcaggaggattacttgagctcaagagtttgagactagcctgggcaacatggcaataccccgtctctttagccaggtgtggtggtgcacacctgtaatcccagctactggggaggctgaggcaggaggattgcttgagcccaggagatcgagacctcagtgagccaagattgctcactgccctgcagcctggatgacaaagtgagaccctgtctcaaaaaaaaaaaacaaaaaaaaccacccattttatagatgaggaaactgagtcacagagagagaataagtaactcacccaaggtcacagagctagtaaaggatgggttaggaacacagaacttgaatacttggtaagtcagatcactaagcttatactaagcttgatgggaggtggagagcaatcatcactggaactcagatttgttgtcaggttgttttagcttttgtttgtgtcctgagttacttaagaaatgccctctgtttgattattagaaccaggcttttctatgctagatatcatggttagaagagattgtcttaaaaacctgcagaattgtccttgtcgtcattgttgactgatctatctaatcccccctcttctgatttctcactttggacatgactctgtggttatttcattcattttaagtatgatgttgttgaataattagagaactacattttctaacaaaattctttctgaaaaccttatgtagggaaaacagagaggatgaaggcctatctaaagagcgcagaaggcttttttgtcctaaataaaagtaccacaattggaaggcatgaaaattcagaccttgttttacaggtaagaagtcttcccacctgttcccgtcccctccctgaccccttccttctccctctctaacagtccttagcgttatgtggactccagtctcttgtacaccacaacctgggcaagcagccatacctttccttggtgtgctaccaatagccagttgccaagggtaccccatttccctggcataaggagtgaagctgagtgctgtacagagcatgatgcgctcccatcctttgctgaacgcatctgtcactgtcccacccattgcagagcagatgagccccaaagtagggcttatcccgagagggttcttggctttgcacaggaaagaattcaagggcaagccaggagtagaaggaaacagccttatcgaagcagcagtgttacagctgtgtggctgctcctacagagcccggccgccctgtagacagagagcagcagctcagggcagttttgcagtcatatttatactcacttttaactgcatgcagattaagggctggtttatgcagggaagggataataactttgggatcattggatgctatggaaaggggagataatgcccaggtgttgccatggcaacagtacgttgacatagcacactggtgggcaggtctgattgaaagttgctttcaccctgtccctattttagctagtcctcagtctggtccggtgtctgagccccacctctggagtcgagtgccacctcctacctcacacctgtggtcatctccccagcagcctgatgtgtggttcagaaggtgggcacagagctggtgctttggcctttgcctgctctgggctagacctctcttcctttcaagaccccatgggactgccgtgggcccctcagaggccagggaggccacggagctccaagccccgggcttagcctgggcattctttcattccattctctgaattagctgtggtttggtccaaagcctcagctcattgacaaccaaagaagttgaaagaaggagaataataataaaaacagtggatttgagcctttttaaacatggaagggggttaaaatattgaagtggaaagagaaaaaatgccgtggaatctctttataactgtgagaagcagatctctttcagacctcactcaatagacttttttaacccttcattttgaaattagagattcacaggaagttccaaaaatagtaggtagagatcacacctaccttccacccagtttcctccagtggttacttactatgtgtgactataacaatatcaaaaccaggaaattgacataagtgctgtgtgtgtgtgtgtgtgtgtgtgtgtgtgtgtgtgtcagagaaagagagagagaggacaatgtgtgtagttctgtatcattttatagatcacatgtgtattcatagatttgtgtgtagcaatcaaaaaattgtcttacctcttctgcttcctttcccttcccatataaattttagaataagtctgtctatatctatgaaatgtcttgctgagattttgatagaaattgtgtttaaatctatatgtcaatgtggaaagaatttatatatttactatgtggtttttcaatccatgaaaatggtatgtttctgcgttgatttagatcttctttggtttctttcatgaatactttgtagctttcagcatacaaatcctgtgcatgttttgctggatttatacttaagtactttatttctccttttttgtttgtgatggtaaatggtattatactttaaatttcagtggccacctcttcattgccagtatatagaaacataattgattttagtatgcttatatggtatcttgcaaccttaactgaactttctagaagtttttttgtcgcctgcttaggatgttaccatgtcatctgcaaattaaaagtttatttttacttatttgatctgtacacttttaattttattttcttgagatgttgcattggctgggacttccagtagtctgttgcagaagagtggtgagagcagtataaatctttatatttgccttgttcctggttttaagggaaaagcattctgtctttcatcattaaatattatattaactgtagggtttttttatagatgttctttatcaaatggagaacattccccctgcatttctagttttctaagagttataaacgcaatcgattttaaaataactcaacataccttcctttgagattctcatccgtgacatggtctccctacaaggacacagaaaactgttcagtgtacaaagtggaaaaatcaaataaaaagaatcgtagtttcttctgtatcataacaaggggtagatttaaggtagttttactttctgggtggccaaggtagaaacagtgatctctgttttgaactggactatgatattagaaaactgtagtaatttttaaaagcacaggctttggagatagacctggatttgaatctcttagaccgttttctggctgtgtgacttcaagcaaactacttaatcatactgagctcattttctccatttataaaccacttatttcacagggctgtagggattaaatgagaaaatgcatataaagtacctggcatatggtactaagtaaatgacgccacaatcgttattatggtcacataaagtggagactgagaatttttgttcacagtaaggtgggtatccactgatactaacaagctatttggaaacaggaactaatgaggacaattattatatatatagacagaaattgagcagcattgattgtataaaaataattgactgcttactgctgcttggccttagtttaaaaagtaagtcaccactgtcagcaacagttccattgatttatgaaggaatcagttgcatttccagaagcatgagcttacactggctcccgagagaacagatgatacatgaattgccaaatgctttgtgaatagacttttaatgggcttttatatcttctcttagacaaatcctcttccgaaagcttaaatggatttgggagagatttgctttaagaagggatgtgggggacacaggtctgttttgaagaactgaaagctacaggcatgtccatatttttcagaaaatattttataagacaagataaggtgaaaattgcccctcttttgccttcactgggcctttctgattaacctgagaatcatgctggatcagctagaagccaccccgagtaataattcaacagtcaatttatcatttgtcttatttgtgctgctagaagtcattccactaaataaagttcaggaatcttaaaaaagtcagctgtgaaattacccagcatttacacctagcaaagaaagaagattgttttatttacttggataaatcctaaagagtagggagctatgcttgtaaagatttattaatatattcatttgcaaagctgccttttttgcttattgatattataatattctgacatcattcacatattctgataatggaaggtaattatgggcctattgttttttaaaaaattgggagaaagcaaactgtaaagaagaaaataaaaatcacttgtaatcatgtgactcagggacaatcaatattggtatttgtagggttttgccctccagactttttttttctgtatcatgaaaggagtttggtttcctaatggcaatagaaagcctgttttagccagcctggtttttgccgttattatcactcattcattccacagacattggcctggagccccagcacggagacaagcctggggacactcacacatggtccctgcaatcaggaagctgctaggagacagacataggtcagaggatctgcagagcctggatggtttcaagcctacgtcagggctctaaaggaaaggaatatggaggatgagaaggacttaactagacaaagggagaaggaacagtgtgtgcaaaggccctggggtagaagagcatatggagagcctgatggactgaaagaaaaccagtgtgtagaggtcagagtgggaagggggagagctaagagccaggcaggactccttcatgccaccgtaaggattttgatcttgatctgaaaaacaatgggaagatgccactgatggattttcagcaagtggaaggcctgcctgttgaaatgggctccctggctgccttgtgcagaaaccaggagctcctttcagaatctgcccctgcccccacctgcattggacagggctggaatacctcggccaccagcctcgctcatttcagagctaaaccttctggttataatctgtataatttgatgtgggttttgaactgtaatgtttatagttggatgtggctgttacttgaacactgataagaaagggacttaattcttccagaacgcagcaatgtcacaagccaatggttgctgggtttttcatgtgcatgagtgtgattgttaaacatgaatcccaaggctttctgacacagtggggttaggtgaggtcaggaatctgtccatttctctgctctgcaggttcaggtgagggtccccacagagatgcttccaggaccgcacagccaggcacggtggctcacgcctgtaattccagtactttgggaggccgaggcgggcggatcacttgaggtcaggagttcgagaccagcctggccatcatggtgaaaccccatctctaccaaaaatacaaaaattagccgggtgtggtggtgcacacctgtaatcccagctacctgggagcctgaggcaggagaattgattgaacctgggagattgcagtgagctgagattgtgccactgcactccagcctgggccacaaaacaagactctgtccaaaaaaaaaaaaaaaaaaaaaaaaaaagagtggagagctgatctcctccttaggacctcaccctgccctgccctacaccgaggagatttcaggattccctttacaattgacttgtagggcagccagaatcaatgcagtgccgtggctaggagggcgaagatcatggagaaaagcaaaggacagaaactgcagggggatgcaggtgaaatgctcatgcctgcccctctgccctttgtggacagcatcctactagttgactcctttctctctaggggaactgttctctatagcatgtcagctccttctcatatgggatcagagggtcagggcacaggagtgatctaacacaacagaaccatccaacccaatgagttgtatccctttgcctggcacctgccatttctgggctgcctgtaagaactataagagcctgcatcaaagtcttttttattattattaaacaatgctgtactgaataccttttacccatcatttcacggacgtgcgagtccatgtgccatgtcaaaggacatgtatggctgcagctctgttggcatcgccacactgccctccagtgaaggcttatagggtcagttccccaccaacagtgagggcaccccctcccctcccgagtggagcatgtgacctacctgacaaatttctgctcatccaagaggcgaaacatggtatccgtgacattttaattcacatttcccatgctatgcgtgaacccctcaagttttgagagagaaggtgacaggtggacatgaacctggataaagatgctcacccctccccggtcctgtgacgaaatccaccaaaagaagcaggcctgggggatgtccagccacctgctgtcccatcaggacgcgcccgttcaccttcctgcctcagctgtgctcgcacactcagccctggctcctcaccaggcgtcctgcgctctgtgatgtgcctcgtctgatctcgtcagtcctcagggaactcttctttcccctgatgtcactggtcagttcccaacacagcaatgcatgggcctactttcccttcagcacgtggagggcttacaagaggaagaagttccaagaaaaggactagatcatcatctctcttttcaataaatacacacaacgtaacatttatcatcttcgccattttaagtgttcagttcagtggcattaactgcattcatgttgtttttttggggggaggggagacagagtctcgctcgctctgtcacccaggctggagtgcggtggcacaatcttggctcactgcggcctctgcctcctgggtttaagtgattcttgtgccacagcctcctgagtagctgggattatgggcatgagccaccatgcctggctaatttttgtatttctagtacagacggggtttcgccacattggccaggctggtctcgaactccctacctcaggtgatccacctgcctcagcctcccaaagtgctgggcttacaggtgcaagccactgcacctggcctcactttgttactctgccaccaccatccatccacaagaactcccttcatcttgcaaaactgaaactctgtacctattgaagaagaattccccttcccctcccagccccccagtccctggcagccaccgtctttctgacaaagtactttctgtctctgaatttgcctgtagcaggttcctcatagactatactatacgctgaatcgtatagtacgtgtcttttgtgactggcttatttcacttggcataatgttcttaaggttcctctgtggcagcatgtgtcagagttcccttccttttgaaggctgaatagtggctgctgcatgtctgtcctacattttgttgatccattcatctgtcaatggacacttgggttgcttccagcttttggctgctgtgaataatgctgctataaacatgagtgtccagatatctctgtctctcttttttttttttttaatggagtcagagtctcgctctgttgcccaggctggagtgcagtggcacaatctcggctcactgccaacctctgccacccgggttcaagtgattctcctgcctcagcctcctgagcagctgggactataggcatgtaccaccacgcccggctaatttttttgtatttttaatagagactgggtttcaccatgttggccaggctggtctcaaactcctgacctcaggtgatccgcccgcctcggcctcctaaagtgctgtaattacaggtgtgagccaccaccgatatctcttcaagcccctgctttcagttctttcagatccatacccagaagagaagcagaaccgccagatcagatgacagttctatttttaattttttgaggaactgccatactgttttccacagtggctgcacaattttgctttcccagcaacagtgcataagggctccagtctccccacatcctcaccagcacttggtattttctgggggtggtggttgtttttacagtagccatcctaatgagagtgaggtagaagatcataatcttctgagacacattgctgtctcagctcaaggttcttttgactagcacagataatacaaacggccacacccccatgtatagactagttatgaggcatctcgtgtggttttgtatgtgttctatgtatatgccgtgtatgtgttacagagctttatcctcaaacagccctatcaggcgagaactactattatcgttattatcctcatgtaaagatgtggaaatggggctcagaaaggttaaataacttgccccaaatcacacatctagtcggggacggtggggctgagtttcagacttggggctgtctgatgcaacgcttctactcaaagatacttcattgtttggttgtaaatttggctttagggaacatctaaaaatctaaatatctgaaattccttgtgagtcagttaagataatcggtagtgggaaatcccacagtttggactcctaggtggggattatcagcagaacagcgaaaatcacttttcctgtgatcctcatcgatgcaacaaactgaggtggcgccctcagtgtgggattggggtaaagaggaaatgtcgacccaggctgcaggtgttttcctgggaagaggtgtgctgagggctgcgtggatgacccacgaggatcctgtctcaggtgtcggggacagctcctcagagcagaccaagctggagctgcctcttacaagagaaagcctggtttgccaggtatgacaggccagaaagggcccccctctccctgccaggtgtaagaaacagcgcacacaaagatccggaggtgttgcttgaagcacttggcatggcatgatgagggctggatggccctgccacccacatgcaaaaaggccacgtaagctaggctaagcgtttcatgtttaacttgctgcgaaaatggaaccccctcctcaaaaggctttgagctggggagaaattgattgtcttcgttattttgaagagaacactgacaaacgtaggcagaatgggtggacaaagaacagaagggcggctctagaacagggtggtcaagagcatgaactcggtgctaggcctcttgcctgtgatcctggctctgccctctgagttgtagggtcccaggcaagttacccagccattctcggctgcaacttctgtgtgtgtatggtggggaactgtgttacgagactgaattaccatgaagtgcttaggacagtgcctggcaggtggttaatactacagtacattttggttattgtattcgttttctatttataacaatgagtgtttattatctcacagttccttaagtcagaagtctgagtggactcagctggttcctctgccccaggtcactcaaggccaaaatcaaagtgttggccgcctgggctcttggctggaggctccagggaatcgtctgcttctagccccactctgttggaagaatttagctcgatgctgctatagaaccgaggcctctgtgtcctcactggccatcggttggaggccagcctcagcttcagaggcctcccaatcccgcatggctcagggcccctttatcttcaaaaccagcaacaatggttctagtctttctcatgcttcagatttctctgacctccccgtctgactcatctctccaactccagccagagaaagttctttgtttttaagggctcacgtggttagattagccccctctggataatccaggttaacctccctgtttcaagatgagtcatcgttatcacttctgcaccatccctttgccatgtaaggcagcagcacactcacgggttccagggattaggacacggacacctttgtgggaccattctgccaatcacagttattaccatctcttgcttggactctggccatagagagggaagcgataatatgggatgttgagagcttttcagaggaatcagtagggtcactgccagggacagtggagaaagatggtggatgagccaagaggatgatgctatcatttgtgttattgtgggtttactttgtgccaggcactgttgtttgcacttttgtgtgtattaactcggttaatcctttcagcaaccctacaagttagggatctcccttcccccattttacagatgaggaagttgtggcacagacagactaaggagcctgcccaaggtcacgtatgacgggcacagagggtgggattcatagtcaggctgtctgggaccgtgcagggacaagaagcttcaggaaaagaggacttccggaacgggggtgtggacacgaggatgactaatcgctgctctatcatgagtgcctagcaagtgggcacgcattgctgtctcagctcaaggttctttcgagccgtcagtgcaccgaggggaactgtcacagactccattacacaggactctcggaactctcccctccctctctcagagtagcactgattctggggagctctcagagataccgcctgaaacagcgtcttctcggggacttgcctgcttctcaagactctcccagagaagctgagcaaggctctgattgacaggagggaagccgacaaacttcctctttccctctgctcccagactcacagtcttaccagagccctggccatttcctcatatccctattcctttgaaaaccccagcttgttctgtttctgcattacatccctttcctgaggcagtgacaggggtcacagtgggggcgcaggatggccaaggaccaaaaggtaaaaagaaatatgatttgatacacacaggtgcctgtcgtcccaggcacttgggtggctgaggcaggaagatcactcgagcccaggggttcaaggctgtattatgctttgatggtgcctggaaatagctactgcactccagcctgggcaacatagcaagcccctgtgtttttagcacacacgcacacacacacacacaccagttaatttcaaaaatgttatcccaccacactgaaaattttgccaaatagtatcttttgtcagtcctttgaggtagagcttatcacactcatttttgcagcataggaagcagcctcagagaggcaaagaaacttgtcccaggctgcacagcaggaatgcagcagaggtgggacttgaactcagagctttctaagtgcagagcccatccttctgcgcataatagtgaacattttaacacctgctattgggctaaaatactcttctaagtgctttttatatatactgtttcatttattcttcaccacaaacccataagggccattctgctattatctctgtttacagatgaggaaactgaggtcccaagggaatagatcacttgcccagggtcaccccactaggaagtaggagagctagaaacgaggtctcactatgtttccaggctggcctctaacgcctgggctcaagtaatcctcctacctcagcctcacaaagtgctgggattacaggtgtgagccacaacatgtattttgtgactgctttatttcaccagcatatgttctcaaggttcatccacgttgtggcagaatttcctttcttttaaaagctaaataacatccattgtttggatggaccacgttttgtttatcttttgtctgtccatggacacctgggttgctttcaccatttggctactgtgaataatgtgaataatgctgctaggaacacgactgtacaaatgtctctttgagaccctgctttcaattcttttgaatatatacccagaagtggcattgccggatcatatggtaattctattattacatttttgaggaaccacaatattgtttccacagtggctgcactattttacattcccagccacagtgcacgagggtttaacatctccacgtcctcgccaacacttattttctgtgtttttatagtagccatcctaaagggtgcaaagtggtatctccttgtggttttgatttgaatttcttaatgatttgtgatcttgagcattcttctcatatacttgttggccatttgtgtatcttctttggagaaagtccattcaaatcctttgcacattttttaatagggttatttttgttttgttactgttgagttgtggggttctttatatatcatggagattaaccctttttcagatatgtgatttgtaaatattttcttccattccgtaggttgccttttcactgtgttgagtgtatcctttgatatatagaagttttaatgttaatgtattccagtttatctatttttacttttgttgcctgtgttcttggtgtcattgccaagaaataactgtcaaatctattgtccggaagcttttcttctatgttttcttttaagggttttatagtgttagctcttatgtttaggtctttgatccattttgaactaatttttgtttatggtgtaagttaagggtccagttttattctttttttttttttttttttttttttgtctgagacagcgtctcgctctgtcgcccaggctggagtgcagtggcgcaatctcggctcactgcaagctccgcctcacgggttcatgccattctcctgcctcagcctcccaagtagctgggactacaggcacctgccaccacgcccaactaattttttgtatttttagtagaggcggggtttcattgtgttagcccagatggtcttgatctcctgacctcgtgatctgcccgcctcagcctcccaaagtgctgggattacaggcgtgagccactgtgcccagcctagtttcattcttttactaatacatgtggatatccagttttcccagcatcatttgttgaaaagactgtcctttccaccattgaatggtattgacacccttgtcgaaaatcatttgaccatatatgcaaaggtttatatgggggctttctaatctgtttcactgtctatgtgtctggcataaatgctaagcccacagtgttttgattaccctatctttttaataacttttgaaaccaggaagtatgacacttccaactgttcttctttttcaagattgttttggctcttcagggttcctttgagaatccatataaattttagaataaaattttctatttctgggaaaaaagaacaccattggaattttgataaagattgcattaaatctgtaggttgcttgggtagtattgatgttctaaacaatattaggtcttccaattcttgaacatgggttgtctttccatttatttgtatcttctttaatttctttcggcaacattgtgtagttttcaatgtacaagtcttttgcctccttggttaagtttatttctaatattttcttctttttgatgctattgtaaatggaatggctttcttattttacttttcagcttgtttattgttagtgtatagaaataccactgatttttgcatgctgattttgtatcctgagtacaaaataaatgattttgtatcatttattatgaattcagtgttatatgtatatatgtgtgtgtgtgtgtgtgtgtgtgtgtgtgatctttagggctttctacatataaaaatcatgttgtccaacaatacaggtaattttatttctgggatatattgaatgcctttcacttctttttcttgtctaactgctctgactaggacttccagtactatttcaaatagaagtggtgagggtgggcatctttatctcattcctggtcttagaggaaaagtcttagtctttcaccactgagaattatgttagctatgagcttttcacatatggcctttattatgttgatgtagttttcttctattcctagtatttttttgtgttttcatcatggaaagagtgttgaattttgccaagtgctttttctccatcagtccagatagtcacgtggttcttccttttcattctgttaatgcattatgttacacagattgattttcatgttgaaccatccctgcattccaggaatcaatcccacttggtcatggtgtataatccttttaataagctgttgaattacgtttgctaatattttgttgaagatttttgcatcagtattcattagggatattggtctgtagttttcttataatgtctttggttttactgacagggtaatgctggtctcttacttcgccttttgagtctcagcttctccatctgtaatatggagattatagtagaactccctgtaaagggctgttttgcagattaaatgagggaatgaacacaaagtgctttggtaaggcccagttcacaggaacttctcaaaatatgttagctgataataataataaaaacagaacagcagttaatctcataatgagacagttcagcagagtggagcttgtacattcagcctatgttggcagcagagctttctactaacatcagttttttgcagttatctaaatacaggagggagtggtattatcaggcagtcctcagaaactctcccttggcctaacacaaggcagaggcttgtcccattttgtggtatcatccaaaacttcctcctggctttgatttcttaatcacggcttgacagcttctgaggagctgaaagtaatgggatttgagaagagaaaaacaaaatgtaacacatagaacttatctctttgatgagttattaagagttcataggctgggtgcggtggctcacacctgtaatcccagcacttttggaggctgaggcgggcagatcacctgaggtctggagtttgagaccagcctggctaacatggtgaaaccctgtctctactaaaaatacaaaattagctggatgtggtggtgtgcccctgtaatcccagctactcaagaggctgaggcaggagaattgcttgaacctgggaggcggaggttgcagtgagccaggattgcaccactgcactccagcctgggtgacagagcaagactccatctcaaaaaaaaaaaaaaaaaaagagagagagagttcttagagcacaaagaaatgtggtcagtaggaatggagatgaagatgatgtgggaagcatttcccaaagggcgaatatgttttcatgtttatttaataaactttattatttttgtgtgtttgttttgagacagggtctcgctctgttgcccaggctggagtgtggtggtgccatcatgactcactgcagccccaacttcctgggccaaagcaatcctcccacctcagcctcccaagtagttaaggccacaggtgtgcaccaccacacctggctaattctttcatttttgtagagatagggtctccttatgttgcctaggctgatcttgaactcctgggttcaagcctcctgacttggcccctcaaagtgctggcatttcaggcatgagccaacatgtctggcctagacttttttttttttttagcagttttaggttcacagaaagttgaacagatagtacagagagttcccacatataacaacccctcccccacaacactcacacatacacacgcagtttcccctattattaacatcttcgttactatgatacatttgttgcaattgatgaatcaatattcatatgttattattaactcaagcccagagtttacattaggattcattcttcacgttataaagttctgtgggttttgacataggcataatgtcaggtattcaccaatatagaatcatacagaatagtttcactgccctaaagatcccctgtgcttacctgttcaacacagccccccaccttcccctgacccctggcaaccacaaatctttctatagttttatctttttaaaagtttcatgtagttgaaatcatacaatatgtagcccttttagattagcttttttcactaagcaatatgcatttaaagttcctctgtatctttttgtggcttgagagctcatttctttttatcattgactgatgtttctaccagtttgtttatccatttaccttctgaagaacattttggttgcttccagtttttggcaattatgaataaagatgctataaacatgcatccaaaataaatgaatcttaaatcccaacaataagaaaacaacccaaattaaagatggacaaaagatctgaacagatactttgccaaagaagatatacagatggcaaataagcatatgaaaagattttaaccatcatatttcacttagcaattacaaataaaagaatatatctccccattttttttctttagcctcttgatgcaatggattacattaattgattttcaaacgccaaatcagttcttgaatacctggaataaatcccacttagttgtggtgtataattatttttatacattgttggattatattcactaatattttgttgaagacttcacgtctatgtatatgggagatattggcttctagttttcctttcttgtaatgtctttatcttgattgggtattcaggtgatattggcctcacagaataagttaggaagtattcctcctgcttctattttctggaagagattgtagggagctggtatcatttcttccttaaatgtctgatagaattcaccagggaacccatctgggcctggtgctttctgttttagaaggttattaactattgattcaaattctttaatagataagggcccagatcatctattcctccttgtatgagtttgggtaaattgtgtctttcaagaaattggtccatttcatctaagttatcaaatttgtggacagagagctgttcataatattcctttatatatcattataaataatatataaaataataatataaatgatatataaattataaatataaattttatatagcatatatttataaaataaatattttatatattataaatataatataaatatattgatatgatataaaaatatggtatatataaaatatgttttatagcatataaataggaatataaaaaatatatatatatttgctgttctttacattttcttttctttttttaattttattattattatacttttaagttttagggtacatgtgcacaatgtgcaggttagttacatatgtatacatgtgccatgctggtgtgctgcacccattaactcgtcatttagcattaggtatatctcctaaagctatcccttccccctccccccaccccacaacagtccccagagtgtgatgttccccttcctgtgtccatgtgttctcattgttcaattcccacctatgagtgagaatatacggtgtttggttttttgttcttgcaatagtttagtgagaatgatgatttccaatttcatccatgtccctacaaaggacatgaactcatcattttttatggctgcatagtattcaatggtgtatatgtgccacattttcttaatccagtctatcattgttggacatttgggttggttccaagtctttgctattgtgaatagtgctgcaataaacatacgtgtgcatgtgtctttatagcagcgcgatttatagtcctttgggtatatacccagtaatgggatggctgggtcaaatggtatttctagttctagatccctgaggaatcgccacactgacttccacaatggttgaactagtttacagtcccaccaacagtgtaaaagtgttcctatttctccacaacctctccagcacctgttgtttcctgactttttaatgattgccattctaactggtgtgagatggtatctcattgtggttttgatttgcatttctctgatagccagtgatggtgagcattttttcatgtgttttttggctgcataaatgtcttcttttgagaagtgtctgttcatgtcctttgcccactttttgatggggttgtttgtttttttcttgtaaatttgtttgagttcattgtagattctggatattagccctttgtcagatgagtaggttgtgaaaattttctcccattttgtaggttgcctgttcactctatatttattatagaatataaatattccataataaatatatccatgggatcagctgtgatggcctctctttcatgtctgatatcaataatttgtgtcttctctctttttttcttggttacctactagaggtttgtcagttctattgatctttccaaagaaccaacttttgttttctttgattctctctattgtcttcaatttcattcatttctgatctaatatttctttcagttcttctgtctatgttaggcttatactgctcttcttcctctagtctcctaaggtagaaactttgattattgatttcagatctttcttcttttcttatgtgtgcattcaaggctataaatttccctgtaagcactgctttcactgcttcccacaaattttaagtggtattttcattttcatttagttaagataatttttaatttctcctgagatttcttccttcaccgtgtgttatttagaaatgtgttgtttaatctccaaatgttttgggattttccacctatctttctgttactgatttcaagtttacttccattgtggtctgagagcatattctacatgatttctattcctttaaattcattgaggtgtgttttatggctcagaatgtggtatagcttagtgagtgttccatgtcagcccaagaagaacgtgcaccttgttgttgttgggttaagtgttctataaatatcaattagatcttgttgattgacggtgttgttcagtttaactatgcctttactaattttctgcctgctggctctgctaattactgacagagggttgtggaagtttcagctgtcatattgggcttatctgtttttctttgcagttctgtcagcttttgccttgtgtattttggcactctgttgttaggtgcatgcacatcaagcattgttatgtcttcttggagaattacccctttaccattatttatggctctcttttttttttttttttttgagtttcactcatgtcacccaggctggagtgcaatggcatggtctcagctcactgcaacctccacctactgggttcaagtgattctccttccacagcctactgagtagctgggattacaagtgtgcaccactacacccagctaatttttgtatttttagtagagatgggttttcaccatgttggccaggctggtctcaaactcctgacctcaggggatctgcccgccctggcctcccaaagtgctgggattacaggcatgagccaccacacctggcctaatgcttctctttatccccagtttttcttgttctgaaactgccttggccgcagttagtatagctacttcagctttcttttttattttaatattttgggtggcaaagtgtttggtggaaacttggaaagtggctaatagcacagacatttgaatcaggcgaacctgagtacaagccaggtgacttgtcaagcggggtgactttgggtaaattcattctgtgtctcagtttccctatctaccaaatgggaaactatctctagattgttgtgaagatgaaatagggcaatgcaataaagcactaagcaatctcctggcttgtaatgtgtaagtaatatgttttattgttactctagtatacatattaatatattctattattaatataagctctaggttgttatatgatggaactttagttgtctacatgcaagtacttttatataaaagctggacagggcaccctgagaagataaacttagaaaatagttgcaaagtctcaagctggcatggatgtctggttgacagtgcccttaaaagatgaagactttggccgggcacggtggctcacgcctgtaatcccagcactttaggaggctggggcgtgcggatcatgaggtcaggagtttgagaccagcctagccagtatggtgaaaccccgtctctcatgcctgtgatcccagcattttgggaggccgaggtgggtggaccacgaggtcaggagatggagaccatcctggctaacatggtgaaaccccgcctctactaaaaatacagaaaattagccaggcgtggtggcaggcgcctgtagtcccagctacttgggaggctgaggcaggagaatggcgtgaacccgggaggcagagcttgcagtgagctaagatcgcaccactgcactccagcctgggcaacagagcgagactccatctcggaaaaaaaaaaaaaaaaaaaaaaattagctgggcgtggtagcacatgcctgtagtcccagctactcgggaggctgaggcagaagaattccttgaacccaggaggtggaggctgcagtgagccgagatcgtgccaccacactccagcctgggtgacggagcgagactctgtctcaaaaataaaagacgaagacttcagtgtgccctgcagctcacagtcagaacatttcccttcatccctccagggccctgcaaccaggggaacatgcagtcacctcctttgtgctgagcttcactcagtcctcttattaaagtgaaattacagaggagcttctgtcccttgccatcagtttgcagacacactggctggggcccctttcctttggggaaacatggtcacaccaagcccccttttgaaaagcgggccatctgtggttaggcaaatcctgaatagcttttaaaaagcaatggaaataactaatcgcatgggaaatatttattgtacatcaaggtttttcaaaggtagttataaaactatgtatgtagggtgtgattaattttgtttaaaaaaatttaaaaggacgtaagcatagaaaaaaaacgtggaaggatgtgaacctcaatgttaaccatggctgccactggtgagggtgggattataagtaacggtaatggcttctttagtacttttctctatttcttgtttgggccatttttgcctcctgtcctggtactgagtaccaccataaatacccatgtggagtcagggaaaaagaaaatggccaattccttgacgattttcggttttggtaaaataaaaaataaaaataaaaacaaaaacaaaaagaaaagaaaatggccaattccctggtcccatatttgtccaatatgactctcccaagatccctttgcctttgtgttgcctgatttccccactcaacaacttaggtacctgtccccaggtctggtgtcagacagagcacatatcccaagctccttcacacactagctgtgtggccttgggcaagtcgcttaacctctctgatcctcagcctcctccttttaaaatgaggattgtcgtgatgatctggcggcggcaaaacaggtaaggcactcagctcaaaacattaggggccgtgtcatttttgttttcatggctacgactgtcctccttctccgttgcagtctcctgacatcgacaaccaccatgcactcattgaatataacgaggcggagtgcagctttgttctccaggacttcaattcccgcaacggcacgtttgtcaacgagtgccacattcaaaacgtggctgtgaagctcatccctggagacatcctgagatttgggtctgcagggctgacctatgaactggtcattgaaaatccacctccggtgagtccgggccactgggggatagaggggccatgtcgccttcgtgcagcccggcgctcggatgcagctgcagggtggcgcttatccacattggtgccactgtgatcgcacgctgcacacaggcagcagagacagagtggaccctgtggagttctgagtcattctggcgggtcccaggaaggagagaatcttagcaccctcttctgggcatttcttggagttgcatcttggctcacatagaaccagttttccaaaaatgtgcaacttcctgagaggaggcggaaaacaaggtgtgcttttgaaaatgcagaggtggatttcatttttaggtagatgagcacgctgctccttcctagctctgtgacctgggccagacttcttcatatgcccaggtctctgccttcttgacggcacatggcatcaagagaatgtctgtagagcctgaaactcagtgtccaagtagacgctcttaacacataagcgcctgaaaagccaaatctgtgaagtccgagccagtgtttccctaaacatgtctgattatcagaatttgagggggactgttcagtaaaattacaggttcccggggcccctccatgggagattctaattttgtgacttgccagtgggggaggaggaggatgcacaatatctctatttcttttttttcatacaaaggtatttattgaagtattatttgtagtggcataacatttgaaacctaaatgcccatcaaaaggggcattgtttaataaaatataaggggttcattcttatgtggataactatgctgcttttttttaaaatgcagctttattgaggtatagttgacatacagtaaaactgtacatgtccaaagtacatcatttgctaggtttgggaacatggatatacctgtgaagccattgccacaaccaagacattaagtgcacccgtcacactacagggttcctcatgaccttagcatttctttgcttccttgctttgaacagctttatagaagtataatttatgcagcataaaccctgcccattttaagcgtacaattcaacacatttcagtatatttacagaggggtgcagccatcaccacaagccactttcagaacattgccatcaccatgtacatcctagaaagaaacctgtgagatacttgactttttgtgttggtttgtgcaattttttatgttttaaactgtggtaaaatacatataacatgaaattcaccgtattcaccgtttctaaggaacagttcagtgttgagtgcattcacattgtggcgctgctgtcacaccgtcgatccacagaactcttttcattttgcaaaactgaaactctgcccctattaaacaagagcacactgtctccctgttgccctctcaccctagcctctaacgaccaccgttctacttcctgtctctgtgaatctgactactctgggtaccttgtataagcgaaatcatacgatatttgtccttttgtgtctagctggtttcactcagcaccaagtcctcaaggttcatccatgttgtagcatgcgtcagactgtccttccttttgaaagctgaagaatgctcccttgtatgagagaccacattttgcttatccgttcttccatgggtagacacgtgggctccttccgccttttgcctattgcaaatgatgcagctgtgaacctaagtgtacaaatttggggaggggtattttgttttaatcacataagtgtgtcacccagtggtaaagatgtccaaccttcacttctgaaggagcaaaagaatgtattataaaagattctgttttggccaggcatggtggctcacacctgtaatcccagcactttgggaggccgagccgggcagattgcctgagctcaggagtttgcgaccagcctgggcaacacggtgaaaccccgtctctactgaaatacaaaaaaaaaattagctgggcatggtggcgggcgcctgtagtcccagctactctggaggctgaggcaggagaattgcttggacccaggaggtggaggttgccgtgagccgagatcatgccactgcactccagcctgggtgacagagcaagactccgcctcaaaaaaaaaaaaagattctgttttgtataatagtttatattttgttagtgaatgagaacggtagagttattataatggaataatgaggaggagcaggagggacactgtgctaaggcatttacctgctttcccttatttaatgcaacagcctagggcatgggctctctcatgatccccattttgcagacaaggaatctgaaactcagagaggttaagtaatttgcccaggaccacacagctagtcactgtgaattaaactctgtctccacttgcaggtaacaattgggagaaaaccattgggtcagctgctaggtgcagcagtatcatcaactggttttcaaagacaacaaagcacacttttttttttttgagacggagtctcactctgtcgcccaggctggagtacagtggcccgagctcggctcgctgcaagctcagcctcccgggttcacgccattctcctgcctcagcctcccgagtagctgggactacaggtgcccaccaccatgcctggctaattttttgtatttttagtagagatggggtttcaccgtgttagccaggatggtctcgatctcctgacctcgtgatccgcccgtctcagcctcccaaagtgctgggattacaggcgtgagccaccgcgcctggccaacaaagcacacttttacagtcacttggctgtacatgaattttaaaaattcttatttctacatgcagttgcctcctgctttattagctaagggacttttggcagccagacatctgccccctggcccatgcccagagtacctcacagcagcccgagcgtttccagggggcaagccgagcctctgtccctgccaggttttcctcagaagaccccctgtccgcctccaccccatcctcacaaaactgctctcggctccctttcagagcattcctagatcaagagacattcgtgcaggcttcctcttagtgacaaagggtcctttgcaggcctgagtgagggcagccatgtggactgagtttctctttctgatggcttccctttctatttgcctgatgacctcgacctgtgagctataaaaaagaaaaaaggaggtagtgaagagcgtctctcatcaaatctcatctcattttggggtccagtttttctaagaaatgtgtagctgtcttgattccagcatgctcttgtctcttattgattctttgagtccctagagagggggctgtgtcttccccgcggtagagttttcaaggattgtttcctttggaagaggactgtcctaatattgtaaggcttagctgttcttttcccaagaaagagttcccaaacagaaaaatttatttcaggctttgtggtgaccataaccaacagagagggacgtgacagccatttcaataggaaatgggaggtggaggcagaagttagagacccaaatgtgtttgtagacatcacagtggctagcgtgggtgtcctgaagttcaagtgagtctgccccacacagttctgccctgctcttgaccagctgtgggatcatgcacaagttgcttcacctctcaaagcctcagttcccatttctgtaaaattggaatcctaatagttcctcatgtggggttactgtagtagtaaacgggtcattgtttgcaaattgcttagcccagtatctggtgcctatgatagcaggaaggtaagaggagcacgctagcagccacctgcctccactgtgagccttcccatggacagaaaacctcccaagacctcccaactaccaggtggatgcctttgcaaataacttacccatggagtgacatacaaggtagaaaaacagaaagaaactcttggtttacaaagtacattggcacccacgatatgcttaagagtacacgttatatatcatagcttttttgccaaagtatagcctaggggccgggcgtggtgactcatgcctgtaatcccagcactttgggaggccaaggcaggaggatcgcttgaggccaggagttcaagaccagcctggccaacatagtgaaaccccatgtctacccaaaacacaaaaaattagccaggcgtggtggcacatacctatagtcccagctagtcaggaggctgaggcacaagaattgcttgaacccgggaggcagaggttgcaatgagcgaagatcatgccacagcctgggcaacagagtgagactctctcaaaaaaaaaaaaagtatagcctagggccaccaccttgcacaactccagtcaccattcacagtagagtccacaaagatggcaccccctggagttgtgcgaggcataacctacagggccatttgcgatgccctgaagcaactgttgagtagtaacactgactccctgcctaagtgtcaggcgtgtgaaatccaagtcacaaagtcagatgtgcttgccgcgttgtttctgccattatgatgtttgcttgttggtttctttagtgctttatgatttccaggaaaggagctgtgagtgagggttgtcctgtgaacactagtgctgttcttataaagcagctaggtaaggaaacctacgttggcctgttctgccctgctcccattccagccagagcttcccacatgacttctggatgcagtccttcgaccctcttgcaacctcatgacatcctgcccaacataaagagtgcccatatgcctggctactcactgccttaaaggggaagctctttgggagtgcagtgaagaacacaaaggctttggagtacgatagactgaagttcaaactccaatggcaatctagcctttctgagcctcagtttccaacttttgccgggcaggaacacattaaccacaggctccctttcccccttcagaatttgcatacaggcctttgggaccatcccatcactgtataaactgaagcccaaagaggttctgcagtgttcccaagattgtgtaatcagttatggccagaaccaggattaagtctcctgagtcccggtctgggagtctttcccaacagcccagagcacctcggtcacctgagagctcaggcaagttcctcactgcagtgctgccagcctgccacttcacatgctcatgggggatgatatatcgtgtgggtagaaatgaaagccaccgatgatagaagaaaatgcagtttcagataggggcttcctcattcgcctccactatcttttcaccagggatgctgctgaagttcctggacaaactcagttccccccttgcagtttcttttttgatggtgatgataatgtctggcggctaatgtttaatgagcatttactatacgtaccaggaagtgtcctaagtacttaatatatatgatctcatttagttctcgcaaagtaagaagtatctgttgtcatctccattttacaggtgaggcacaaaacgtaacacatttttcggggttatagatggtaggaggcagaggaggtagattaaccaattctgcttaattctaaatcccatgttcttaaccagaggtcggcagactacatcccatgggccaaattcagaccatctcctgtttttataaataaagttttattgtaacacctccatgcccaccagtgtttttctgctccaatggcagagttgagtagacagagatcatatggcacacaaagccaaaaatatttactctctggctctcttagcaaaagtttaccaacctccactcataacactatgctattctgcctctttcatttacccagtgtctgaaagaagggctaaaaaggaggataggagattctggggataggagaaagaatgaatgcccccactatctgctaggaactgcgctggttaatagtttacttagttaactgaggaataggaaaaagggaaaatacgctttgaacagtcttcattacctcttttttttttttttttgagacggagtctcactctgttgcttaggctggagtgcagtggcacgatctcagttcacagcaacctctgcctcctgggttcaagcaattctcatgcctcagcctcccaagtagctggaattacaggtgtgtgccaccatgcccagctaatttttgtatttttagtagagacgcagtttcaccatgctggccaggctggtctggaactcctgacctcaggtgatctgcccaccttggcctcccaaagtgctgggattacccgccttcattacctctttaaaacagaacttggagatatgtggttctaaatatacacatacatgtatatgcatttgcatatatagtaatataatcatattgatacatctgataaatatgcttgacattaatgtataatatacacaagagatgaatatttataaattttacctgtttcttcaactggaagtttttttttaaaactttggaatgttttccctgggataacttttgaaacagaaatttgaggtttatagtccagaggctgctgtagctagagaactgtttatttgttccaaatttctccacctaatgttttactacctgtggttggttccttggtcttaagtcacttcttctctggggccactgctttactcttacaagtttaaaggtaaatttggtgcatgattatagcctggtgggttttactcaaacaagtcagaactcgcattaacacctttcattctaagtacatagtgatatttgtgctcaagtgtcaataagcatattttccaggaaattttactgtttgcaagtgtcagaaacccaactcagactagcctaagcaaaagaaggagaagaagaagtagctgaagttatttttcatgtaactgaaaaggccagaagcatcagcttcaggcctggctagatccaggtgctcaagggatgctcaggaatctgtctgttagggttacctctctcggctttggagccccccctccctctttctctgtaccgggagtttcttccttctgtcttcttccttctttcttgcctattaaactttccgatccttaaaactcaaaaaaaaaaaaaaaaaaaaggaatctctttcatctttgtgagcttcacagtctcaagcagattcttgccccacctgtaatgaggtggccactggcaaccccagcaccttccaaactcagcagctctaggaaaagagcaagcgtcttcattggcttcgtttggatcacatgactatccccgaaccaatcagtgaggccagagacatggaatgctctgactggccaggcctggggcatactccctcccctggagtggaggggatgagccccattgtgggagggaggggtgtctcccccacacccatgcaggagatggatgcaatgtagggaggaaaaacaaaaaaaaagcccatggcaagaaagcattcctcctacctaagctgagcctccgtaatgagattccgtgctaggagcttggggtaagaaaatgatgaataatccattctctatcagggaagttccaggcaggtctccaaggaagtagcgtggcttgtttttctcctcggtgtatgatgagaaggacacagagttgggggtttagtcatccatcccagggaaggtggcagttcccatcttcatgggaccgttaagtactccccgttcttgagaagaatgtggctttgcctgtaaccaggccgagtaactggggattgaacaaagaaccagagagcatggcacacttcagaagaaacgtctcgatagccaagctttgtcatctcccatcccgatcgtgtagtattttcctctacactgtgctgttacagctcttggaggggacctgctgatgtgatgaaagatcctgagaccaggtttttttatatcaaaggacattttccaaagcccatgaagtggagggcatggggcagcagacagcctcaggcacaatgtcctcggcaaaaacacagaaggactcctgaagtttgcttcctcctcagatgtctacagagtgtgcagacagcctaggggactgcagggaggagcgcaggtggaagccttagcatcctggtgaaacagaacacggacgacccggcccaaaaccccagggatcaaccgtggctgtttcctgcaggtcacactcttcccaaactgcagccacatcgccgcttttcctaagttagttgatcatgcattggttcattcagtcactcaatctggcaagactgagctccagcaggccgagtctagggtagaaaacgcagtttgcaaacatctaagtgttttctccttagattctctttcccattttatggactgaccaggaaatgaattagaacttaaaggaaaaggaaaactttaagctagaaggtttacaaagatggaaagtaagatgggccagaatgcacttaggtgtcccctaacccacctggccaaaatccagataaatggcctttttgaatagctcaaagggacctacttctttaagttctaaaacgtggaaatagtatgtaacttggctgttctgtgttctaacatgtataatcccaatttctggaatggaaaatcctagacataattgatccttttcttggagacttagaattattgccccattttgaatcctggcacccgccaggggctgttgagatggagaaggctgtcttcctgggccgcacatagcaccctctgctgccctggggctcttctgtctgcgttttagggtctggcagtcagttcctgctctctgctgggatcagtgtgcctcctttcccccttctttcttgccccttcctgtccttgtaattgtgtagttattagggtaaaattgagtaagatcagaggaagtagaggctgaaagtagacctagaggactacctgtatgaataagcgacattagtggttccatgtggattttgtattatttttttctggtaactcaaaggtcccttaaaagagttttgtttttgttttttaattaaataacctggccaggcatggtggctcacacctgtaattctggcactttgggaagtcaaggtgggtggatcacttggggccaggagtttgacaccagtctgaccaacatggcaaaaccccgtctctactaaaaatacaaaaaattagccaggtgtggtggtgcatgcctgtaatcctagctcctcgggaggctgagtcataaaaatcgcttgaacccaggagacggaggttgcagtgagctaaaatcgcgctactgcactccagcctgggtgacagagtgagacactgtctcaaaaaaaaaaaaaaaaaaaaaaaaggagaggggaggaagggggcattgattaagactcagctccacctcctggttggggattacttatgtgtgttacattcttctgtaaggaagtgtctcttctctgccattgaattatttactcattcatgtatctatatcagtacggactcctctgtctttatttgattctctgtgctataatccacctgatgttatttattttgtagctcatattgtcctagccttggccactggagcgcttttgggttggtgcttatccctctaacagggcccgcaccttctgtttttgagcacttactcactttctgctgttacaagatgccccaggctcatagtgtattctccctgccccagccccagaatcagctgaagggtattttttaactttggctctgtttgccaattgttcaattcagttcggtcagcaggcacctagagtgtgtgccaggcccttcactgggcactgggtccagccagtgctatgctgatgagtgtctgaaaaagtaaagtatgcaggtatagtataaagcttactgacacaaagaatgtgtagcacattctttataaataataacaaaatatgcaggactctttatggcaaatttatcataaattccatagagccattgattctcacagagggtttttattgatttttgccaaactcttgtatccctagccaacttatggtagcaactgatgaatgtttccaaccggaatactggtggatatatttgtttacctttgtgagtaagacgaaagtgaaatgagaaagatttgtattggaacctcacatgttcatcaatgacatgagcaccttctttgctatcatagtttatgaataccagaagaaactattggataatagtttttgaatatcagaagaaaatttcctccatatcttttgtgctactcataatgtgatggctacagacataaaacacttttaaatctcatctgtattactaatattttatccaacaccttcctaagaatagacaagcaacaaaacaaaaaatcaatccctgatttgtaacattccctgatttctgtggtgtaaatactcccattaatgcagaataggcaagccccaaaattgggacttagccagggagggttcttggctttgcccaggaaagaattcaagggcaaaccagcagtgtgagacagcaccttttatggaagcaacagtgcacagtggcaggagcggggctgctacttgctcagcagggctaccccatgggcagtgcgcccagagtagcagctcaaagacaattctgcagtcatattcatatccacatttaattacacagaaacgaaggggtggtttatgcagaaatttccaggaaaagggtattacctttcaggtagttgggtcattgccatggaaaggggtggtaccttttgggtgttgccatggcaatgcgaaactgacatggcacactggtgggcgtgtcttatgaaaagctgcttccactgcggccctgttttagctggtcctcaatttggtctggtgtctgagccaaacctccagaattgagtcccacctcttacctcaccatcctggccaatttcaagcttcactaacacagagccacagagagctgggtagcagcacatcactctacagcactgccaacacacagacgcagtaggaagaataactgtaagagcacagattatcatgaaatatagtaaaataattaggaggctaagttttaagtatttattactgttgtttctggtataatttaattgtaagtatatataatttattttttaatggctgtgtttatcagccagctcacagaattctcaacatttactcatcggctctcatgagccagcaccaacaggccccagctctcctctggcacagcagtgagccagctacagccctgcctggggggagactgcagttctctgagtggcatccagggtgctgcacataccctgtgactcagacttgcaggagggaacctataacgttcctggaaaatcctgtccacacatcaatcctgtccatgcaccatcttggggattttcacaccatctatttctcattttcattttttaactcagaaaatctattcttcattagccaatcatctaagatccttttgcaagtatggaaagcaagtgcaaatcatgacttcaaatgacctggaagctccaggggcacagagtttggagtcagacagcatcaccacttccaggcttcaggacctggggcaagtctctgaacctcactgagcttctgctcctttaatgcacaaaatgtgggtaaaaatgcttcccctaccccagagttattctcgtgattagatggggccacatatacaaagggcacagcacagcctagcacctagagccttctctccttggtggttcaaagccaagtggtaagaattggaggccaggcacagcggctcacgccggtaatcccagcactttgggaggccgaggcgggcggatcacgaggttaggagatcgagaccatcctggctaatacggtgaaaccctgtctctactaaaaatacaaaaattagccgggcatggtggtgggcgcctgtagtcccagctactcgggaagctgaggcaggagaatggcatgaacccgtgaggcggagcttgcagtgagctgagattgcgccactgcactccagcctgggcgacagagcgagactccatctcaaaaaaaaaaaaaaaaaattgcagatagcagaaaacatgacagatgctccaagggcaaggtctacttccccaccttgtccacagcctccagggcttcctggaagaatgcatgggtcctgtaggactctgggcaaactcccttggcgttttagggtgtccttctcaccctgaagccttgacagggtcagaagcagatgttagcgtaataacacaagaaacaaggagatcatccggaaacaatggatttggagttctcgagtacattactggttgggtgtttattcaagctgatagaaattcagccgtgggtgtggtccaggtggttggcagcctgctattttagacagtgtgggagagatcaggaaaagcacatgcggcctcaaaaataaacaaagaaaaaaccaccacgccacacaccatatggtcagagagaaagaaagaggaggaaagaaagaaagaaagagagtgaaagaaagaaggcactagcaagtattttttaactaatatttctaagccagacttgttgataactgaccttgatcccaaactctatgtacattctaatgtgagctcagccaggagccagtttttcaggagtcttttttttatgtttgtttatcctcctcactgtttccttgtagttaccagcagcaatttctgagaaaaccttgaccttgcttatgatagagtaggcctgttaagtagagaagactgacattaaccttccaactaaagccaccctaaatcaacatgctttcaaaaaacaaacaatgccgggcgctgtggctcatgcctgtaatcccagcactttgggaggccaaggcgggtggatcatctgaggtcaggggttgaagaccagcctggccaacatggtgaaactctgtctctactaaaaatacaaaaaattagctgggcgtggtggcacatgcctataatgccagctacttgggaggctgaggcaggagaatcgctggaacccaggaggcggaggttgcagtgagccgagatcacgccactgcactccagcctgggtgacaagagcaaaattccatctccataaataaataaataaataacaaaataaaactttttttttttaactgaaagagctgattgcagtctttgctgcatttacacatcatgcactggcccctttagagaccctctcattagcactgtgggggctacaagtgacaaaaccagctcaaactagcctcacagtactgagcagttagtgcagggtgcaacgcgagccagggctcaaaaccagcttctctgtttgttcattatgcacaatagccaagaggtgaatgcagcccaagtgtccatggacagatgaatggataaataaaatgtgatctgtccatgcaatggaatattattcagccatgaaaaggaaggacattctgacacatgctacaacatgggtgaatcctaaggacattgtgctaagtgaaataaaccagtcacaaaaggacaaatgttgtatgaatccacttatatgagggacagagtatttaaattcatagaaatagaaggggaatggtggttaccagcggctctgaggagaggagaagggagagttatttaatgagaatatattttcacttttgcaagatgaaaaagttctagagatctgtttcacagccattagactatacttaaaaatactgaactgtacacctaaaatggttaagatggagaattttgttatgtatttttttacaattaaacaaaaaccagaccaggtgttggggctcatgcctgtaatcccagcactgttggaggctgaggcaggaggatcacttcagcccaggagtttgtgactagcctgcacaacatggcaaaaccccatttctacaaaaaatacaaaatttagctgggccttgtggcctgcgtctatagtccaagctacttaggaggctgaggcaggaggatcacctgagcccggaaggttaggctgtagtgagctgtgattgcaccactgcactccagcctggatgacagagtgagacgctgtttcaaaaaaaatggagaaaagaaaaccaccttccctctctccacgtctgggctgcaccccttggtgctggctacattctcaagtccccagttctctgtggctagagattctggtgtccagcctagtctccttggctctgattggatcacatgccccacccctggccaatcactatggccactgaatgtgatttgttgcttagccccacccacaacaattggccgagagagggagggagatttacccacaatctccaaaagatgctgagtgggttctggcctggccactgcagaagtgttacccttgagacaggagacacgctcactcccattagcacctgtgcagttagttggcatgaggcacccttaacttagagccctgcctactgaatgtcctagcatgaaagtagattcctccaccacacccaatactctctacctttgtgttccagaaggctggagtaaaacgcattggagtttgcccgctgtcatcttcagcccattcattcaatgagtacttattaaacccataggaaaaggtcatgggaatgagtgaggcaagacagccctgaggatggggaaggacatgatggacggagaagtcagcccagggcaggggcacagtggctcagcttctgaaaccaaagaatggaaaagagggtaggtggagaggctgagatgttgacagtggagagaaatgggaaactacacgtaaggtaacagagttctggaactcggcccagacccactcctgaaaacagacttcaagtgggccagtgtcatttgaatgcctggccaggtgtccccagatgtattagtccattctcacactgctataaggacataccagagactgtgtaatttaaaaacgaacaggtttaattgactcacagttccccagggctggggaggcctcaggaaacttacaatcatggcagaaggggaagcaaacgtgtccttcctcacatggcggcagcaaggagaagtgcagagcaagggggtggggaaagcccattataaaaccatcagatcttacaagaagtcactcattatcacgagagcagcatggaggtaactgcccccatgattccattacctcccaccaggtccctcccagtccgtcctaaggggattttgggaactacagttcaagatgagatttgggtggggcacagccaaaccatgtatcaccaggtgatcggagtttggtgccagatttcccagaacactcctcactgactccaagaaagagccttagggggaatgcataggatccctgagcagctgtagacagactgcagcttggagattaggatcctgagtggagagccctccttttcaatgaaacccagctgaagttctaggaagtgctgtctgctggagctctgattttggaagcattctgtccttttcctcattgtgtgtgtctgagctcatcttctctctgggctacagaaggagaaccatgagccctgggaaaatagggatgagttctattctaggaagcaaacctttgaatttagctcttacctggaaagcattatttctgccaagacaattgggagacagaggaggggaaagagagagagagagaagaaggagaggccatcagatcttgatcccagttccctgtccaccactgcctgtgctgggtaaatcccttaacctctccaagcctcacttctaacaggaataaggagaaccctcacacaaagggtcatggtgaggaatcaataagctcggtgcaataagtgatagtgctcatcagtgccaccttcaaccactaggcaccagggagaaaccaccactaaagcattaatccacggcaaaagccaggtgtcagcaccactccacgtttgctcatccacggttagatggattttgacatgctctccactgaaagcagctggagcatcttccccggggcctctgccagaatcagctgtgctggtgtggaaaagcaaaggctaatcagacagtcagtgtccctgcaatcccagagctctgaactttgagggatagagggacccacagtatggacagaaagagaaaaggctgtggagtcccagggagctgggctggaatctcagtgattggcttgttctgttattttgaccaacatttgaggacctactaggtatgtgccaagcatttattctaggggctgaggatacagtggtaaggtagatgaaaagtccctaatcccttagaggggacattctcctgactcagcagatcaataccacgtctgtgggtgttcagagtcccttgttcttgcctggcctgtgtcctccgagtgttgatatcacagagtgttgagtgtattaaatgagttaatgcaggtgactctttcggcaagatgcctgggtaaagcatgcactcactcaatggtggtgtgatcgtgtgccgtgtggtccaggcaaggacccccatcccaaacttgaggagagtccaggaaggcttcctgggggaagtgactcattgtttttttgtttgtttatttttgagacagagtctcattctgtcgcccaggatggagtgcagtggtgctatcacagctcactgcagcctctacttcctaggctcaggtgatcctcccacctcagcctctcaagtagctgggactacaggcataggccacaaggcccagctaatttttgaatttttggtgaggcagggttttgccatgttgtccaggctggtcttgaactcctgaactcaagctagctagcctcccactttggcctcccaaagtgttgggattatagctgtgtgccaccctgcccgaccggaagtgactcataaaccaagaccttgggcagcaatgctgtggctgggacaaagaaatggagaccatcccagccggtcataacctcccctgacccttgtctgcccctgcaggtctctttcccatggatgaggggcccagcaccatggccagggccacagccacctcgtgccacacagcagccaaaccaggcccccccaccatcacatatccccttccaccaaggtgtccagccagcaccgatgcaaaggagctggtcccaggcctttcccagacccaccgtggtcctgccggcctcccacaggcggcctgtgagcgccaacaaggagatgttctcgttcgtggtggacgacgcccgcaagccacccgtcatcaagcaaggtatgcgtcagggctgccattggtggcttgggggtggttcacggccatgtggatgggtcttggttttggtttactttctgattctaaaagtagaacatattcaattgtaaaaaatgaaaataaattcaggataagcagaaagtaagaaaacagttaaaaaatcagccgtaatccttatccccagggtctccctattgactctctgctgcgtatccctccagcctctgtgctgtgtccgtatacacacaccagggcacctgcagtgggtgtggcctctgtgtgtgtgtacatatgagtgtgtcatgggatcacgtcaacacactttgactcagttgtgcaaaaatattagtaattgcaatcccctttgcccccaacagccctaggagcttttaaaatattttaccaccattttacaggtcagaggagagtgacacttaccaggaagatgacttctcccgaggaagtgtattcagtcccgtctaatctaatgtttttcagtcccatttaaaggctggtgagctcggtgacagcccactcacaacctggtcactctgggacacacacaaccttcagggtgtccttccttccccactacccccttgaaagcctcatggcacttggggaggaaacttcccatctgtcactgtcctcttggcctcagcagcctcaccagcagaagagctggtcagtttagtccccaggcatggttcccagagttcctccctagcctatggcatcaaggtcccattttctgtcctctttgtcccagccccaggcccttcggagtccccagacatctcccagcggcttccatatctttttccggtcttgctcaagaccattcatgtagtcaccttcctcagtcactaaaatcattattactgtgacatacgcaagctgaagagtaaaggccatgtgtctccacggtttacatcatcatcaccgtcatcatcaaatgcaccaccacatacctaccacccacactgagaaatgactcagccattttcccccaacattttaatatgaacttttttttttttttttggacggagtctccctctgttgcccaggctggagtgcagtggcaggatttcggcagtggtgccatctcagcgcactgcaagctccgccttctgggttcacgccattctcctgcctcagcctcccgagtagctgggactacaggctcctgccactatacccggctaattttttgtttttgtatttttagtagagatggggtttcaccatgttagccaggatggtcttgatctcctgaccttgtgatccgcccacctcggcctcccaaagtgctgggattacagacatgagccactgcgcccagccttaatatgaacattttttaaacatacagcaaagtaaaaataattttacagtgaccccctccccacctaaatctaccattaacattttactatactcttttttttttttttttttcttgagacagagtctcactctattgcccaagctggagttcaccttctgggttcaagcggttctcctgcctcagcctcccaagtagctgggattacaggcacacaccaccatgttcagctaatttttgtattttcagtagagacgaggttttgccatgttggccaggctggtctcaaactcctgacctcaagtgatctgcccaccttggcctccaaagtgctgggattacaggtgtgagccaaccacgcctggcccattttgctatactcttattgtatatctctctatcaatcattttgtgaattcattaattcatcttaattttagatacattttaaaataagtttcctacagctgtagacttccccctaaacatttagcacgtataccattaactggagttcaacagtttttgtctttttgtgtaaaattaacatacggtgtgtattagttaccaatttataaccaattaccctaacatatagcaccctaaaacaaaccaaaaccctatgcgttatcttacacagtttctgggggtcaggcatttgggagtagcttagcaggatggctgtagttcagggactctcaggaggttgcattaagcttttgacgagagctgcggtcctctgaaggcctggggctggaggacacatctcctgggtagttcactcacatccgtgtgtgaagaggcctcagttcctcactagctgacagcaggaagcctcagttcttcaccactgccacctctcctaggctgcttgagtctcctcatgaaatggctgccagcttcctccaaaagagtggtcctagagagaaaagcagcagccacatgtctcttaagatccagcctcaggagtcaaactccatcatttctccagtagccttggttacatagataagctctgttatggctgaattgtgttctctcaaaatttatatgttgaagtcctaatccccagtaccacagaacctaactgtattgagagagtgcctttctttcttccttccttcttttcttttctttttttctttcttttagaaactgagtctcactctgtctcccaggctggagtgcagtggcatgatctcgactcattaaaacctctgcctcccaggttcaagtgattctcctgcctcagcctcctgagtagctgggattacaggcacccaccaccaggcctggctaatttttgtggggttttttttgttttgttttgtctttttgagacggagtctcgctctgtcgcccaggctggagtgcagtggcacgatctcggcttacagcaagctccacctcccaggttcacaccattctcctgcctcagcctcccgagtagctgggactacaggcgcccgccaccacgcccagctaattttttgtgtttttagtagagacgagttttcaccatgttagccaggctggtctcaacctcctgacctcaggtgatccacccgcctttaaagaggtaattaagttaaaatgaggtagttaggttgggccctaatccaatctgactgttgtccttgtgagaggaggtgattaggacacaagcaacaccagaggaaagaccatgtgaggacacagtgagaaggtggccgtctgcaagccaagaagagaggcctcaggagaagccacccggccaacaccttgatctttcaacctctaaaacttgaaaaaataaattggtgcagtggctcacccctgtaatcccagcagtttgggaggctgaggcaggaggatcccttgaagataggagttcaagaccagctggggaaacacagcaagaccccatctctatttttaaaagaaagaattaaacatttaataaagtaaaattaatttctgttattgagccccctagtctgtggtattttgttatggcaacctgagcatattaatacaagcttcatccagcatgggagatgactatataggggcatgaatacagggacaagaatcaccagggtcatcttggagactggctgccactcaatgaaatgcacagatcttgagtgaacactcactacgttttgacaattgtatacacttgtgtaacccaaacccctgtcaagaacatcaccatcatcccaggaagctccctcaggtcccttccaagtcagttcccaacccttgcccccagaggtaaccactcttccaaattctttttccaccatggattagagactcctgttctagattctcaaatacatggaatcatgtagtgtatgtttttcatgtgaggcttttttcactctgcatatttctgagattcatccattttgctgtatgtcttacaagttgttccttgtggccaggcgcggtggctcatgcctgtaatctcagcactttgggaggccaaggagggcgaatcacaaggtcgggagtctgagaccagcctgactaacatggtgaaaccccatctctactaaaaatacaaaaattagctgggtgtggtggcacgcacctgtaatcccagctactcaggaggctgaggcaggagaatcgcttgaacccgggaggcagaggttgcagtgagctgagattgtgccactgcactccagcctgggcggacagagcaagattctacctcaaaaaaccaacaaacaaaaaaacaaaaacaagttgttccttgttatcattgagtcacattccatggatgtatcacagatttctttatccattcgtccattggtagacacagatgctgtttctttcttttttcactcagtctttgatgagtagatttctccacctgtttctccagtgccatgttgaacttgggaagtgagtgagccatgaacggtcctaaggctttgaggccctcagatctgcctgggcgtcaccactgcagcctcccaccggggtgtcatctgggtggggaaggcaccatgatgtccgctcccaaacttccaccgtgtttccctgatgcggagaggggcttccatcttcctgtagtgaggagttcccctgtgtcagacccgggcctctctgctccaggcttaggagaacacttccggctccaggcctccaggttggctctccattgaaagcaccgagttttgaggaatctgaggaagccctttcctctcttaacaaggctggactcttcaaacaaaatggttttgcctttagaccattgctttgctttcgatttgaaaaattctatttggaaacgcaaagccaaggacttacttattctaggtcagggtttctcaatctcggcactgctgacatttggggccagataattgtttgttgtggggctgtcccgtgcattgtttttgagacagaggctcactctgtaacccaggctggagtgcagtggtgcaatcttggctcactgcaacctctacctcccgggttcaagcgattctcctgcctcagcctcccaagtagctaggattcaggcgcctgccaccacacctggctaatttttgtatttttagtagagttggagtttcgccatgttggccaggctggtctcgaactcctgtccttaagtgatctgcctgcctcggcctcccaaagtgctgggattacaggtgtgagccaccaggcctggcccggcctgtgcattgttgagtgtttagcaacatccctggcttctacccactcgatgctctcagcagttctctcccactcaagctgtgatactcaaaattgtccccagatgttaccaaatgtcacctgaggggcagaatcgccctggtcaaggcccccgtcttggtggtgctcgcccttctcctcgaacaggcagtaaggccgcagctctaaggccgaatcttaatggcaaagctcatacaggtgagggaggaagaattagaatggagaatggaaatgcgtggggtgatttttaaagataccatcctgatttatatatactgtaagtaatggaataatgatgagattgtttgaccctaacactggtatcctactttttaaaacgtaacactgcatcatgaaggtcaatatatttactgcataatggttatgagtacaggctctggatcaggcaaacttgagttcaaatcttgactctatcactcaccagctgtgggaccttcagcaagtacttgacatcccggtgcctcagttccctcacttacaaaatatgatatgaatgtcatgtcactagttgttatgctgtatttttattgttgtattgttattttttattgggtttttaagaagtatttttggccaggcatagtggctcccatctgtaatcccagcactttgggaggctgagacaggaggatcacttaagcttagaggtttgagaccaacttggataacatagcaagatcctgtctctacaaaaaattaaaaattagccaagcacggtagcatgcacctgtagtcacaactacttgggagcctgaagtgggaagatcaattgagcccaggaggtcaaggctgcagtgatccatgatcatgctactgcactctagcctgggtgacagagcgagaccctgtctgtctgtgtgtgtgtctctctctctaaacatatatatatatatacacacatactcatacatatatattttcaatccacagttggttgactccacaaatgtggaacccacacatatggggggccagctgtatctatttcttgttataaatcccaatatcacagaaccagacataaataaggcttcgagggccatacagtctgtgttgcaactactcaactctgtgtttgtggcacagaagcagccatagatgatacatatgtgaataactgtggccacattccagtaaaactgtactttcagtcataggctggattcagccccagggctgtagtttgccagtccctgctctacctaacgtttcgtttactcttcacagtagccctttatgatagagactattcatgcccctaaatgatatgtgtggaaactaaggctgaaagagattaaatgacctgcccgagagattaaacgatctgcccaagatcaccagctcttctgtggcataggaaaaaggtctggaaagagacacatcacgttgggtaacagcagttatcaaaggaagaaggaaggaggtggccctttccctttctagtacttccgtgatgctttcactgcttttcagtgaacacacacaccactttgtaattttttttttttttttttttgagacagagtctcgctctgtcacccaggctggagtgcagtggcgcaatctcggctcactgcaagctccgcctcccaggttcacgccattctcctgcctcagcctcccgagtagctgggactataggcgcccgccaccacacctggctaattttttgtatttttagtagagatggggtttcaccatgttagccaggatggtctcaatcttctgactgcatgatccgcctgccttggcctcccaaagtgctgggattacaggcgtgagccacagcgcccggcctttaatttttaaattacataaaatatcaatctctggggggaaacaaacaggaaggctaacgtgaacatcttcttcaggcctcagggaaactcatgatgtcttttgtgctctctgctgatctcacgccttagtgtggaccaatgccatgaaactgtcagaaaaatcagtggccgaggggattcctggggcagttccccctgcggagatttatgtggaggaggacttggcccagcaggacaaggtgagggaggggtctggggaagggtggagctgcagcagcaagcgcactgcaaagggacttgccgatgcctgttctgtgtggcccaggagtgcccttatcctgcttccaagaaaccacctcttactccccaagacattcaaccaaatgttttattctaaattacgacctccgcaaccactgtttattaagcatctactgtgagctggactgtgtcctgtgcacttaacattcattcactcatttaatctttgctgtcttcaaaataggttttttaaatcaccatcacttaacaatgaggaaaccggagctcagagagtttaagtaacttgcccaaggttgcacagtaaaaggggcagaattgagattcacacccaggtctggttaacttccctagtgggaggaagtgagagctgaggtcagagatgactaagcaaatgagaaagacttgttaaagaaccagagaggtttagggagtgagacaggaagagaggtcagaacagataaattgaagcaaacttgggaaggatggatccaggttgattttgcctcacttagccacaacctgaaaattatatgataatcgactacttttgcaccaacctaatactaaaagcaatgatccacaatgccttgcttcccctaaagatcagggcctgaccttgcagccattctcagagtctgtaaggagcagaaccacctggagctcttgtcacacacgggagtgacatgtccaggaatctgcagcaatggtgagtaaggtgggaagtcaggtttggatgctctgtcagttacccactgctgtaaacaagccagcccaaaacttagtggcttaaaacagcaatttatttcccacaattctatgggttgccttggaaggttctcctgctggtgtcttctgcctcactcatgcaactgcagtcagccggtggcgtggcaggggctgatggtctcagaagtcctcattcccatgtctgggacctcggttgggacacctggaattagtttttttgcttgtttgttatttttttttagtttcttcccacagatttatttttttaagtttttatagagtttttattagttttcttttttttaatttttccataagttattgcggtataggtggtatttggttacatgagtaaactagtacagccaatatggaaaacagcatggagatgccttaaagaactaaaaacagagccaccatttgatccggcaatcccaccactgggtatctacccagaggaaaaacagtcattattcaaaaaagatacttgcacatgcctgttaatagcagcacaattcacaattgcaaaatcatggaaccaatccaaatgcccatcaatcaacgagtggataaagaaactgtggtatatatattcaatggaatactatgcagccataaaaaggaatgaatttacagcatttgcaatgacctggatgagactggaaactattatcctaagtgaagtaactcaggaatggaaaaccaaacatcgtatgttctcactgatatgtgggagctaagctatgaggacgcaaaggcataagagtgatgcagtagactttggggatttagggagaagagtgggagcagggcaagggataaaagtctacaaatatgatgcagtgtatactgcctaggtgataggtgtaccaaaatctcaccactaaaaatcaccactaaaggacacttggaatttgagccctctctgcacatagtttttcatcctgggcttcttcatagcagtgcagtggcctctgggtttccagagggccaggacagaagctgtacagcctcttaagaacttgcttggagaccacccaatatcatgtctatcactttttcttggtcaaagcagatcacagggccagcctagatttaggggctggggaaaatagactccactgcttgatggcagaagctgcaaagttatttgtagccatttttaatccaccacagttgttaagctggaaataggatccaaccacgtttctaaatttttactatttatgaaatatttatgccctgacttgtcaggactccttcaagtgcaagtgacaataaacaaattgatttaagaaaaaataggctgtgctcagtggctcgcgcctgtaatcccagcactttgggaggccaagcaggaggatcacttgagcccaggagttcaagcccagcctgggcaacatagtaagactcgatttctgcaaaaaaaaaaacaaaaacaaaaaacaaacaacaacaacaaaaaaacgagccacccatagtggaacttgcctatagccccagctactagggaggctgaggtgggagcatcacttgagcccaggggatcaaggctgcagtgagctgtgattgcaccactgtgctccagcctgggtgacagagcaagaccctgtctcaaaaaaaaaaaaaaaaaaggaaaaaaaaaaaaagaaagaaagaaagcatttattgtcttatcttattggaaaatgtaaaagccaaccagcttcaggcatgactggatccaggagcttgaatgatcagcttcccctcccccgctatcagtttctccactgtttccctcatagttttgcttttgcagcaggctggcttcttatgttggaaaacatgactgtagacaaactgaagtctgtaagtttaaagtttatgatccaaaaggaagcaagagcttcttcctcttttaagtaatacatgaaatctctgagaaaatgccaattgaccaggctgggtcaattgcaggtgggacaggaaggcaggtgggacaggaaggatcagggcacataactgaccctcctaccaagaccgtgtggaagggtcaggggtgctccctcaaggaagtcacagggtccccaccagaaaggcaggaaccatagctgtgcaccataagctgcaggcttctctgtacttcagtgcccagcacaagcgtggcacacagtagatgctcaatacatgtttgttgtgtggatattgaacaaacacctggctggaaatggagccctcgggtaactcatattggataaggcaaagggctgccccagagcatggactctgtttgaggctgtcctttgaaatgttgccacaagcactcacagggacccaatgacagaccctggtcagcagttgggctccatcatgaccaaaaccctgtggttccccaggttagcaagctagaaggtcgagctctccaggcaatgagctggcctagaaactgcccacccgcttccttcccaccagtggaaaattgcatggagagcagtttcctctcaaagtaactgatcaggaactctgtagctgcctatgaatcacatcggggaatttttgttctcaatcttcctgatattttattgatgcgttctggtgagaagtttgggggattttttcccccttttttgggaaacctaacaaattcttcggctacggtgctttttcttttggagagatgggggactgggttaatgatacctgtgggtacagcctgccaagcccaaagttttttccagcctgaaatttacaagagcctatatacataaatcaccattcccctctcatttatttttcatgactcagttacctggaataaatttttatgtgaataaccaaaagagccagggaataacagaagagaggaaaggggaaaagctatttcagaatgtattaaatttgtaaagttaaatagccccattatagtcagaatgtggttgaatagagtcatttccttaattacctttccttcgtccccagatgttagactgaggcctggtaagttgattcctaaaaatattataaataaactttttggcaacaaaaattcccaagtgggatggtggttcttaatatgaaagtataattttaggggaaaggaaagtttctgtcgctctaaggtatacacatgacttatagaagtctgtatgcaagtaatcattttaaccaaactcttgtctctatgagttgccaagtgacagagagcctcaaagtctgccttttccctgcctgcctgcccttactttcccaaaataattacactataattttcctacctttttttgagacagttttgctcttgttgcccaggctagagtgcaatggcatggtctgggctcactgcaacctctgcctcccgggttcaagcgattctcctgcctcagcctcccaagtagctgggattacaggcgcttgccaccacacccagctaatttttgtatttttagtagagacagggtttcaccatgttggccaggctggtctcgaactcctgacctcaggcgatccacccatcttggcctcccatagtgctaggattacaggcgtgagccaccgcacccggcccctacttttttttaatgggctcagcctcacacctaggcccacacctagtaagcctcccatctgatctctacccaggatgaaataattctgctgctgggaaaagaggtcagccgtctctcagattatgaaattgaatccaaatacaaagacgtcataatagcaaacctgcagaatgaagtggctgagctgagtcagaaggtgtcagagaccaccacctccaggcagaatgagaaggagatctcgcagaagtgtcaggttctggatgaagacatcgatgccaaacagaaagagatccagagcttgaaaagccaggtaggcagagcctgagaggtacagcacagctctcaggccaaggcccgggaggccccaggaccaccaaccaaggtgagccacccagagttagggaacgcgtggtcagtggagcatggtggttaagaacacaaatccacaagactgggagattcggcagtttcctagcatggtaagaacaagatcagcctttgttcagcactggccatgtgcaagaactagtgcaaagcgctttagattaacttatttaaacctcacaatcctctgacacatccattctacagatgaagggtctaaggcaggcccaggccgggcgctgtggctcacacctgtaatctggcactttgggaggctgaggcaggcagatcacttgaggtcaggagtttgagaccagcctggccaatatggtgaaaccctgtctctattaaaaatacaaaaattagccaggcgtgatggtgcatgcctgtaatcccaactacttgggaggccgaggctgaacctgggaggcagaggttgcagagaactgagatggcgccactgcactccagcctgggtgacagagtgagaccctgtctcaaaaagaaagaaagaaaaaagtctaagacaggcccagagacacccaggaactgcttacagcttgcacagcacgtgagaggtggcagtgcaatttgaactcaggtccgccttctcgcagaccccatgttctcacctcgatttcctatttccccacaatgctgtcacttcagtaaccgcgtctcacccaaatccagccccagccagagagagctatgggaagttagctaagtggggagaaggaactgcccggtgttccaaacacagaggcctttaccaaaccctgaaggcagttagttactggttcacttatagggaatttcatcaaacaaaaattcttcacctggaatttctgaatttaccagtcatgtacgtttctcttgaaacttgattcaaattctttttttttttactttaagattggtcagtgatggctgggcgcggtggcgcacgcctgtaatcccagcgcttcgggaggctgaggcaggcagatcacaaggtcaggagatcaagaccatcctggctaacacagtgaaaccccgtctctactaaaaatacaaaaaattagccaggtgtggtggcgggcgcctgtagtcccagctactcgggaggcagtagaatggcatgaacctgggaggcagagcttgcagtgagccaagatagcaccactgcactcagcctgggcgacagagcgagactccgtctcaaaaaaaaaaaaagtggtcagtgatattgtatatcagtcaacaaagttgttaaaagagtaatgggccactggtgaatttcaccctcagtgcatcatgctggttaaactgtggacatgcctggggcctctgttcgccgattcactgcttttggcctctgccttctgtacccagttcagggtgcacagtttcagccctggaaaaagcctaggttagacatggtgaacctcgaagagtctttccgggactataaactccacaagggcaagggctgggcctagttaccttccagaataggacagtgtctgttcattcattcattcatccactcattcgttcattcaaacgtttgttgagtgactacccagtgccaggccctcttttgcgctctgggaattcggcagagaacaaggttgacctgatccttgtcttcttacagttgtgttccaatgagggggacagagtagacaacaaaacagacaaatatatgccctaatattgaggcagtgaccctccttcagacctgtttttgaaagagcaatgaaaggagctggtcctataggaaatactgctgcagacagctgcctggacatgtctctaactccttgaggagcctctttctcttctcatctgaacccagttttgcaaccagatctccatctttttcagtaactctcccatttcagagctttcctgcactaagtgaagtgtcttgtccagatacaaggttaaggatgagtaactgtcacatctctttgagtctgtgtccacattttgggtattgtttaaagtgctcacattatctggaaatttatctttcaccgtgaaattatctataaataattactctgtagccgggcgtggtggctcacgcctgtaatcccagcactttgggaggccaaggcaggcggatcacctgaggtcaggagttcgagaccagcctggccaacatggcgaaacccgtctctactaaaaatacaaaagttagccaagcgtgatggtgcgtgcctgtaatcccagctacttgggaggctgaggcaggagaatcacttgaacttgggaggtagaggttgtaatgagcagagatcatgccaccacactttagcctgggcaacagagtgagactctgtctcaaaaaaaaaaaaaaagaaagaaagaaagaattactctgacttattaatactcctccccccactttgatcttggctcataattgaaagatgatactttataacaaagcatctctgagctaaaggatgcagttggtctgaatccaaatcaagtttcatctgctcacattttagtctcttaaatattctattgccaacagaacattcaagcagacgtacaagccacatggcaggttgatttattgttctgattactttattctcctgggtctcctgaaagtgtgtgcataacgatttgctctcaaagcccttcgatctgatacaataccccaagacaatgcgtaccgccatgcggcctgcactgcctgtgctaattagaagctgaattagtatcttaaagcaatcagtcttcctagcactattaactttcttatgacccagtgcccattttattacacagtgtaataggcactaacacctggggatttatgccaattatagacaatatggatatttattttggtcatgaaattgatgaagatgtttgaagactacttggagttttcccacagtctgatatcctaaagctctggtacttagattgaaacatttcctatctgtcagacagcactggagtctgggggatgtattttcccatcccttctggaagtttctctctgtgttgtgcctctggtatacaaacaaaagcattaagctgagaagagctgtaacttttttaaaaaaaaattccaagtgcctttttatgggagagttgcatgtccccacagaaaacaggaagaggtgaaataatttttttcactccaagtttccgaagtggagacctgcgcaagtatggccttggagagggttgggacattgcagcccatgtccctccatcttctagtgagcaccccttctccagtgtctcagatgccccagggaagatgtgactggtgcacgaaatgggccgtagaaattgtgaaaccttgatccttctgttaattctaccaccgagtcatagccacaaggttttcagggacagacactaaaaacagactgtgagcgccacctggtggccaggtgcagggcacaccgtatctgcattgtcggggtcccccccgactcccaccctgtcatatcttatgatatgcctgcaacacgatgagatgattaacagggattcttgcactcctcttaataacaatcacactggtgtttaagtgagcctaggcaaggcttacaaatgcacacaaaaatactatcagtctaccttcctggagacaggcaagagaagcagaagctaaaacgcaccgtagaataatcagagctagtgtctatgtggggagccaggcatggtctatgtactcttacatgtactaacttatgaaaatgctttcaacaaccctgaaattacgactgtcaccacacttacagaataaaaaaatgggacagaattggtgtcctccctaccttcacacagagacggattttgcagatggcagtctggctcctgagtccctaccatgctccacggcctcaggctgttaatgctggttcctagagccacgtggaaagaactggaagcaggcaactaaagcctggatttggatcgtaactctaccaccgactgatccgtgcaatcccaagcaagcaacctcacccctctgagtcttgatttcctcacttgcaaaatgggagctgatgtggtttgactgcatccccaccaaatctcaacttgaattgtatcccagaaatcccacatgttgtgggagggacccagcaggaggtaattgaatcatgggggccagtatttcctgtgctgttctcgttatagtgaataagtctcatgagatctgatggttttatcaggggtttccgcttttgcttcttccgcattttctcttgccgccgccatgtaagaagtgcttttcgcctcccaccatgattctgaggcctccccggccatgtggaactgtaagtccaattaaatctctttttcttcccagtatcgggtatggctttatcagcagtgtgaaaacagactaatacagtaaattggtaccaatagagtggggcattgctgaaaagatacctgaaaatgtggaagcaactttggaactgagtaacaggcagaagttggaacagtttggagggctcagaagaagagaggaaaatgtgggaaagtttggaactttctagagacttgctgaatggctttgacaaaaagcctgatagcgatatggataataaggcccaggctgaggtggtctccgatggagatgaggaacttgttgggaactggagcaaaggtgactcttgttatgttttagcaaagagaatggtggcattttgcccctgccctaaagatttgtggaactttgaacttgagagagataatttagtgtatccagcagaagaaatttctaagcagcaaagcattcaaaaggtgacttgggtgctgttaaaagcattccattttaaaagggaaacagcataaattcagaaaatttgcagcctgatgatggagtagaaaagaaaaacccattttctgggggagaaattcaagccagctgcagaaatttgcataagtaccaaggagactaatgttaatccccaaggccatggggaaaatgtctccaggacatgtcagagaccttcacagcagcccctcccatcacaggcccagaggcccaggaggaaaaagtggttttgtgggccaggcccggggtccccatgctgtgtgcagcctagggacttggtgccctatatcccacccactccaaccatggctaaaaggggccaacatagagcttgggctgtggcttcagagggtggaagccccaagcttttgcagcttccacatggtgttgagcctgcaggtgcacagaagtcaagaattgaggtttgggaacctctgcttagatttcagaagatgtgtggaaatgcctggatgcccatgcagaagtttgctgtggggtcggggccctcatggagaacctttgctagggcagtgtggaagggaaatgtggggtcagagcccccacacagagtccctactggggcattgcctagtggagctgtgagaagagggcccccgtcctccagaccccagaatggtagatccaccaatggcttgaatcgtactcctggaaaagccgcagacactcaacgccagcccatgaaagcagctgggagagaggttgtaccctgcaaagccacagggatggagctgcccaagaccatgggaacctacctcttgcatcagcgtaatctggatgtgagacctggagtcaaaagatcattttggagctttaaagtttgactgccctgctggatttcagactttcatgggccctgtaacccctttgttttggccaatttctcccatttggaatggctgtatttacccaatacctgtacccccattgtacctaggaagtaactagcttgcttttgattttacaggctcataggcgggaaggacttgccttgtctcagatgagactttgacttttgggttaatgctgaaatgagttaagactttgggggactattgggaaggcatggttggttttgaaatgtgaggacatgagatttggaggggccaggggcagaatgatatggtttggctgtgtctccaccaaatctcaacttgaattgtatctcccagagttcccacacattgtgagagggacacagggagaggtaattgaatcatgggggctggtctttctcatgctgttctagttacagggaataagtctcacaagatctgatgggtttatcaggggtttccacttttgctttttcgtcattttctcttgccgctgccatgattctgaggcctccccagccagtgaaactgtaattccaattaaacctctttctctttttttttttttggagacggagtctcactctgtcacccaggttgtagtgcagtggcacgatctcggctcactgcaagctctgcctcccgggttcacaccattctcctgcctcagcctcccgagtagctgggactacaggtgcccgccaccacacccagctaattttttgtatttttagtagagacagggtttcaccgtgttagccaagatggtcttgatctcctgacctcatgatccacccgcctcagcctcccaaagtgctgggattacaggcgtgagccactgcgcccggcctaaacctctttttcttcccagtctcgggtatgtctttatcacagcgtgaaaacagactaatacgggagcattcccaggagccttctgtggagaggccatgaggctctgttgaaggagtagtgtctgtgagtgggctttgtaggttctagagtgttctgtgagatataacctattgttatcatttgagggaattaattttataacatgcttccctctcttgaactttgctctgtatccagtcagtactgggcgacctggaaccaacaggtgatctgtttatggctgagagtccaaaggtcatcagaaggcacattaagaaaccaggtgtccccagtggcagccaggcctgggcccctttatgggcacaaagataaggttcatgttttgatgacataggaagtggtggtccttgaaggaacaggccctcccctgtcccttccactggttaaaactaaaaagcttggtttccccaacaccccagccaaaactcaatctgaatctttctgtcaagcttgtgagaagtacctgtgtgtctcccagacgtgggccagcccccctctgactgtgccacctcctcccacagatcagtgccctacagaaaggctacagcaaggtgctgtgccagaccctgtcagagcggaactcagaaatcacatccctgaagaatgagggcgagaacttaaagagagacaacgctatcacatcaggtgagcccttggagtcgggcctgggagctgccactcccgcacccgttgttcttggccacagcagacatcaccaatcaaccacatactttttgttactgaacttggctgcagcctcagagttcttcccagcagccctttaggcagttcctgtccatgaatctgagttcaccctcagaggtttatgtgccatccagttcctagcatagggcctggtttggagtgagcccttgataaatatttgagcaaatgttatctgttagctaaaaggcctgctgagcatggacctcaccagggaacacacaggacaagctgcagctcaggcagtcccatgagccagtttgctgtgaatgcaaactagaatgtggctaaaatggggttgccagtttaaggcacccagcctcttacccatctcacactggtgctcttgggccggagcgaaagcattttgctaattgagaggtagctggatactcaagaacttgggtgggcaagggggcagccaactcatggcccacccttgccaggcacagctgtttcttagcctggattcattcattcattcattcattcagcacatttatggagcagctgctagatgccaggcactgttctaggcactggggagagagagccctgagcagtcaagatccctctgcccctctgctcatggggctcacacttgggagaggatgacagacaataagaagtaaaaagataaatgaacaagcccataccagagagagatcagtgctccagaggaaataaagctggacaccgtggtggggaagcactcagggggtgaagtgaaggagaatagcttagtgcaagcttgtccagcccacgacctgcgggccacatatggcccaggacagctttgaatgaggctcgacacaaattcctcaactttcctaaaacattatgagattttttttttttagcgatttttttttttagctcatcagttattattagcgtgagtgtattttatgcgtggcccaagacccttcttcttcttccagtgtggctcagggaagccaaaagattggacatccctggcttagtgcctgggcagggatatctctgaggaggtgggaggggctgtcgggaggcccctgggaacggtatgctgggcagagagcacaggtgcaaaggccccgaggctggaccaagccacggtgttggatcaactgccggcgagtgtggctggagtcagggaacaaggggctatgggacctggtggggtcaggggggaggcagggccacattacatgggaggggttcaggttttcttctaagtgtgatgggacacgttagggtttttaaggcagagaatggcatgtctcgagacctgcagatgatagggccatggacagagaaagggggaagagagaaaagcaggtggtggagagggaatgagtccagattgggcatattgctcctaaagtcccccctgcacagcaggaaacatgcccgtggctgtgaaagcagagcgtagcattgagtcagacacaatcgctgtctccgcaggacccaggccgcctggccgtggctttccctctgcctcactctgcagtccccctccccactccaggcttctacctctgttcttccctaacatggaatgttcttggatacttgtgagccctatgggcagggctgctctgggcaccaggcatcccagggggatctcgctgggccctgccctcctccccagcgtctgtccatcacaccccatccacgctacaagcctgtctcagacaccactcctctaatcaaggagtcagacagacctgggctcaggtatggcctgggatgggctacactctcacggccccaagtgtggtccctggaccagcagcatcagcatcacctggatccttgtgagaaactgggaatttcaggccccactcctgaccttccgatcagaatcttcattttcacaagcctcccggctgctgcttgtgcacacttaagctcgagaagcactgggccgggttacgctgcagtgacaaacagtcccccaagtctcagtggctcacaatagacaggttcagctcctgcttccaccctgagcccatcatgggtcagtaggggctttggtcattgtggccacacagtgacccaggctcacagaagccatcacaacacatcacaaaccccatcttccacaggaagagaggcagatggaggaacaaggtgcggatttcctcacctgcctgaaacaactcaaacaaacaaacaaaaaccaaacaaacagaaaaaaatgtctgaaataatggtttccatctattggccccaagaagcatgtgacgatgatctgggagggagtggaaacaaacaagatgaaatctacgattgcccccggctggcttgcgctggagagagtttccagaccacagcagggaggggaagccagacagagcccagtggtcagcccgacttgaggagatggaggtggagaagccagcacagcttgagtttgctgggtggcgtgccaggcgggagggggctgcacggagagcaccccggagatctcagagggtccgcctcaagtcttcagcagagtcaggtgtgatgagcacgtgcatgtgggcagggaaggaaccacccaggaggagcagagggaaccatctcgaagcccacgtaggcctgagagtagctcactttcccaccatccagaatggggcaaccttgcactacacagggcacctggtagagactcaagccaaattcattctagagaaaaggtcactctggtcccgcctcacaaagcatgcaggcaagccccagagagagcagtctgtttctaaggaacttaactgtgtccccggacgaagctcatttttacaatgaaattctgaatcatgttgttctttattacacatccttgattgtgcaataaagattgattcttgattgatacccaccaataaaactaggatgaatgtttttctaagaaaaggaccgtatgagataacccaataccactgcattatgcacccttcttctcactttttctcaatgtgataatacaataatatattgactatctgctgtcacataagttatcccaaaaaagcaacaaatatgtttatcttacccggtttctgtggttcaggaacttgggagtgacttagtctggctcagggtctctcacgaggttgcaggagctactgctgtcatgtcatctaaagcccgactagggctcgaggatccccttctggaatgactcgctcacatggctgttggctggaggcctcagttcctcaccatgtgtgtccttccctagggctgcttgagtgtcctcacaacatggcggttggctttccccagactgagtgatccaaggagagcaaagaagaaaccacaacatctttgatgattcaccctgggaagtcacattcaccacttccacagtgccatatgagttacacacgtcagccctattcaggtgggagggggctacacgaggccaggtattctaacaggcagggatcatgggggccattttgcaagctggctaccacatatacttgtgggtggcagggaataaacactatgtgttagccactctactatgttctttatacaactctgtagatacaatgagaggttaaataacttcttcagaccactaagctaggctgggcattgtggctcacatctgtaatcccagcactttgggagacagaggctggtggattgcttcagcctgggagtttgagacccgcctgggcaacatgggcaaaactccatgtctacaaaaaatacaaaaattagccaggcatagtggcacgtacctgtagtcctagctacttgggaggccaaggcaggaggatcgcctgagtccaggaggtcgaggctgtagtgaaccatgatcgtgccactgtactccagcctgggtgacagagtaagaccctgtctcaagaaaaaagacgactgagctagtaagtgctagagacggtttccaaactcagatgagtgtgaatcaacacgtcccttgctgccacaggcccatgtcgtggcccctcctggtccctctctctgctgagcctttgttcccaggcagggccgatgcccacagcaccccgacagatgtttcctgtctccagcaacacgcactgactgacctctccttctcactgggaccttgaacaaatgatgtgcagtggatattggtctcaaccccattcaagctcctgggatccttggagacacctcccttctcagtgccaggctcgtcacaaactggttgacagcggcagcgatgacagtcatcctcactgcctctttgacctctgcgagtcttcttttttacagggatggtgtcatctttgcaaaaagacatattagcaaaggatgagcaagttcaacaactaaaggaagaggtcagtcacctaaaaagtcagaacaaggacaaggaccaccagctggaagcccttggctctagagtgagtaaggatgactgcgtcaccttgtagccatccggtgaaaagcagctaaagtgaagtcacgtgatatgcttgtttcattcaccctgggcccttagtttaaatttcattccttcctctcacaccattgtgctgggggcggggtggtgggggggtgggcgttgggggcaaaacatgaaatgcctacctagaaaaactaaaacagctggccacattctttgcaccttttcaaagatcggcgtgcacgtgccccagaataagcaagatgtagcttcaactccaggaaacattttctaatgcccattataaatgagtttggttaattccagcagtaaatgcacctctcagcttggctatttccatggcaaggcttaatattaaagcagaatagaatcactgcatgcaaaagaggacacggtgggcttcccctcatcccagtaaccactggtttgcacagtcaccttcgaagcagaatgtttgcaggcccaagtgcagttagacagactttcatttcttcccttagactttagtgtgggtaagaatattctgtgtggagtgaacctggtaggcaagtcaagagctgtttaaaagtaattttgaggccaggcacggtggctaatgcctgtaatcccagcacttttgggaggccgaggctggtggatcacacgagatcaggagtttgaggccagcctggccaacatggtgaaaatctgtctctgctaaaaataacaaaaattagccaggcgcctgtaatcccagctactcaggaggctgaggcaggagaatagcttgaacctgggaggcagaaattgcagtgagctgagatcgcgccattgcactccagcctgggcaacaagagtgaaactccgtctcaaataataataataataataataataataataataataataactatttgcaaaatgtacctcaatgctctgactttagaatcctgaacctataggatttctcagtatttgtgagatgtgtctgtttcggtgagtcaaggtaaaacctaacagctttcatctcaggtgtgcctgaagagttcgccaagtctgcatgggcacccaggcagggtggatctgggggtccaaggatgaagcagcagtagtgacctctggctctgaccgcagtgccccaactggagctggggaaaggcaggacaggagccccgggggcacacagaccagggtccgagcccagagtgggcttttgttataactgatgtggcctcccctttgtcatcagcgaaatgggaacaacaaaatcagttttgagaagtgagaggccggtttgcattgtgcgcttccgcctctgcggctggttagcccgcctcgcccagccctctgcatccgtcccccgagcagggtcaccgcctggattacatgtgttgtcgccctttcaggtgtgtgggtatgtgggtgtgggtgtgaggatgtatgtgggtgtgtgggggtatggatgtgtggtgtgggggtgaatgggtgtgtggggatgtggatgtgtgtaagtgtgtatgggtgtgtgtggatatgggtaggtgtgtgtgtgagtgtggtgtgtgggggtgtatgggtgtgtgggggtatggatgtgtggtgtgggggtgaatgggtgtgtgggggtgtggatgtgtgtaggtgagtgggtgagggggcgtgtggatgtgtgggtgtggtgtggtatgggggtgcgtgtggggtgtgtggggtgtgtggatgtgtgtcggggctgtagagctgatgttaggtgggagaaatacggagaaacagcagctccggagctcttctgcccacgaagtgcatttgggttacttgtgtccccatttcccttccccgttgaccttggaacaggtctgccttcttctccaggccgcacctggcgttcatcagcacgtgggctcctcgtgaccaagggtattgctcatgtgaacatccgaatgactgtctttatttttcaaattacatgtgctgtgttaattttagaataaaaagtagataaaactggagagcaaaattaaagagagaagagaaatgccaccgccaagaaatctatgtcagtacttgagtgcatattccttctgttttgtttctaaaattacctggaaaaaatatatctgtaacagatatataacaacaaatttacactatatacattttttaaactttaaacaattactgtttcctcacatggataagagcttttctcatgggtctttaaagctccatgacattctcttgtctgtgcacaatggaatcaaacagccccgggttatcggacatgggtgtttccttttttttttttttttttgagatggagtctcactctgtcactcaggctggagtgcagtggcgcgatctcagctcactgcaagctctgcctcccgggttcacgccattctcctgcctcagcctcccaagtagctgggactacaggcgcccgccaccacacctggctaatttttttgtatttttagtagagacagggtttcatcgtgttagccagggtggtctcaatctcctgacctcatgatctgcccacctcggcctcccaaagtgctgggattacaggtgcaagccaccgcgcccagccgggtatttcctttttgttcactatggctaacaatactctcaaaaacatccctgaacctacagacttgctgatttgcccagccattgtccttatacattcttaaagcagaatttctgggtcaaaaaggaggcccattatatatgttcttaatgcccgttgccaaattgccctccagaacggctgttccattttcaccgccgctcccagggcagtggtgtcttggaggagtgaattgcatgaagcactgagagccgtccaggctcgctagtggccctccaaggacatccgtgtttattcctcagcacagactctccaaagctggattttccttgtggtttagattgctggcttttgaagatgagagtagtggctttattcctctgatttcctgagtggagaagcaggaacagctttgggatcctgtgtgcccgtcagacaccatgggatgccttttgggatctcagtgcgtgactggatggaaacagcaggaaatgctctcaggggctcacatggggccttggagcccctccttcccccgacaaccctacctggccaacgttggcctctttctgtgttgcccttttctccacagtgctcggtgctaaaggaagagttaaaacaggaagatgctcacagggagctcagggaagcccaggagaaagagttaaaactctgcaaaaccgtgagttgagcttcctcctttgtaggtaccaccagaaaaaacagagtttgaccttgaggttcttggtgggatcctgggccatcactaagcatgaagctctggggctctgtgcttgcttgtttaacatagtctcattgctctttgatctgctgcttctgcaagaaagagatgggtgaaggggccccaggattccctgggcagttggctctagctccctcaagggtttcccctggggccaggttggggttgagaccggggacagggacaggaggctggccagctggccaccacatggtcccctgccccacccctgacctgtgactcccaaacatgtattccactgtcccaagttttatcctagccacaggcaccattgttgacacttcctgaagtatttttatttaaacacaactatttaacacccacttgtaaaaacaaaacaaggcagtggctcacatctgtaatcctagcactttgggaggccaaggtgggtggattgcctgagctcagaggttctagaccagcctggggaacacggtgaaaccccgtctctactgaaatacaaaaaaattagctgggcatggtggcgggtgcctgtaatcccagttgcttgcttgggaggctgaggcaggagaattgctcaaacccgggaggcagaggttgcagcgagccgagatcgtgccattgcactccagcctgggcaacagagcgagactctgtctcaaaaaaagaaaaagttatttgccttatgtagaaggtaaccataaaaataaatacaatgaaaataagaccattaaaagtcaaaggaggtgtattcctgacgccctccgaatccaccctgcacatcaccaggtgtgcgttttccactcgggaagttcagcttctccaacttgctcttccccacgccagcaccgttcctccaggccaggaacattttactctctgcctcaaacaaaaaagaaaaaacatttcattgttccgttcttccagaccttgcctgttgagtcttccaaacagttggccctttagattgaactcaaaaatataacccaagagcagggtttcaagtgagttgatgggtgtcctgtagtccttaatccaggagctgtactgacttccaaaagaaactaatttcctttatccagaacttttaatatatcagtcgaaaaataaagtctattttgctgagagatgtaaaaccttcctccaggagaaggaattaaataagctgataccagacaaggtttccaccttaatggatgggatgccaggggatgatgagggctcagacctctcagccaagaaggcagctcctgcccccatcagggaggttcactcttgttgaaactttttcagcaaatccaagacatggagaaagaaatgaagaagcttagggcagagctgaggaagagttgtactgaacaaagcgtgatctctaggactctgagagaaaaaagcaaggtacgtagtggacaacaggcccagagagtggtgtgggcggtagctccccactcatcatccctgttagtcctctaagtggactatgctggtattaacccttcttacagctgagaaaactgaggctcacacagggacagggaccaggttcactgcataaagtagttgtggcaggacttgaacccaggttggtctgactccaaggcccctgtgagtaaccccactactcctcactgccttctaaaactgtttcttgctttttggtaatgagacccacctctggcctcccaatcccagttttgagtttcgtgttgcttaattattttaatgtcccttcccatcatgggaaaaaaaattgtattgcatactccagacctgcgctatccataacagtagccactaaccgcgcatggctatttacatttaaattaaagccggtagctcacgcctgtaatcccagcattttgggaggctgaggcagatggatcacctgaggtcaggagttcgagaccagcctggccaatgtggtgaaaccccgtctctactaaaaatacaaaaattagccagatgtggtggcggaggcctgtaattccagccactcaggaggctgaggcaggagaatcacttgaacctgggaggtggaggttgcagcaagctgagatcgtgccaccgcactccagcctgggcgacagagcaagactccgtctcaaaaaaaaaaaaatttaattaaaaataaataaaacaaaacgttgctcctcagttgccagccacgttccaagtgcatagtagccacgtgtagctggtggctgctgcactggacagcacagatatggaaatttccatcagcacagcaagtcctattgttttaaattaatggtgacctcttttagcaacataaccaattgaagagttgtataaaagatgcttatggatcacacatttattttaatttttttaactgaaaatatcttcgagagtcctgagcagtgtggacagaatctctttctttccatttgaatcatctagtttatttgattagaagatggttgtcattgagaaaactaagaattttttttttttaataaataaagacagagcttcactatgttgcccaggctggtcttgaactgctggcctcaagcagtcctcctgcctcagcctcccaaagtgctgggattacaggtgtgagacaccacgcccaaccacaactgagaatattttaagaacaaatctaaaaggcagaggaattctatgtgaagggaggttctcagggatgatctgagaaataaaagcaaataatctatttttctccaattttatttaatatgaatgtgagtatagtcagcagaagtcaaatcattaaaacctcgtgagctgaaatgtatactacacaaggatcacatcttatggatagtattgaagcctgcaaaagttggccagacataagtagacttggcagaaataattaacacaaaattaaaatcaacagttaagactatacaaagtaaaatttatttatcaattaaaacttaagagaaaaatcaaatattcttgtccaggtgcagtagctcacgcctgtaatcccagcactttggaggccgagacaggaggattgctttagaccaggagttcaggaccagcctggccaacacagtgaggccctgtctacaaaaaattaaaataatcacttaaaaaaatcaaatattcttgaaaaagtttagacttgtaaaatataatatggggaaaatggacatggtagaaatgaaaactacaaaataaaacacagacagacagacctgtgattggtaaatatttgatagggtccagaaaaacttatggatgaatcaaatcataattgtataatttgcctacaaaagaactgatccagatcaaaataatttcaggagactaaagtgaaaatggaaacatttggaaatctgttaaacaactggcttaatgaactttgctctagaaaataccctctcaatgaaaatgaacttgctatggtatatttttcttttaaatagttgtagtcatgaacatggagtcaaaatgctctctgggctatcaatttttctctaaacaaggctttggctgcattccacaagtcttagtacgtagtattttcgttattattcagatcaaaatattttccaaatccctttgtgatttcttctttcacccatgggttactatgcagcttatttcctaatttctaaatatatgagggttttctgcttaccttttttgttactgatttttagcttaattacactgtggtcagagaacattttctgtgtaacttcaatcttttgatattaattgagacttgttttatggcctgcatgtggccgactgcagttccacgtgcacacttgagaagaatacgcatcctgcagtcattgggtttagtattctgtatatggacattaaatgaagcttgccgataatgctcaaaacttaaatgctcttgttgattttttttgtctgtgtgttttgtcagccactgagagaggcatattgtttgaagatcctaacatgattgtggatttgtctgtttctttttttaatattgtcaatctttgctttatatattttgaagctgtgttagtagatgcatatgtatttaccatttcattacttcctatcgaatcaaatctttggctatcacaagatgttcctcttcattgctagagatgtttttcctttaaagtctttgtcattaaggtagctccatcagatacactagctttcttttgatttgagttttcatagactatctttttcatactttttatgtcaatctttattttacaatgtgtatctcatgtgaacagcacataggttttatacagtttgaccatctttgtctttcagtccaagtatatttaatataattgctggcatattgggatttaaatttatctacttgctcagggccaggtgtactacctatgttcctttttctccccattctttccttcttttgagttgatgggtttgttttgttgttgtttgtttgttttttgagacagagtcttgctctattgccaggctggagtgcagtggtgcgatctcagctcactgcaacctccacctcctgggttcaagcaattgtcctgcctcagcctcctgagtagctgggactacaggtgtacaccaccatgcccagctaaacttgtatttttagtagagacagtgtttcaccatgttggccaggatggtctccatctcttaaccttgtgatctgcccaccttggcctcccaaagtgctgggattataggcgtgagccacaatgcctgggcgagttgacagttttttatcattccctttgcccccgtactagcttggaaatgttctctcttttacttttcttttagtaatcataagacaatagcacgcattcgtgacttatcaaaatctaatatttagtgagtttttaactcttactattttagtggttattctaaattttacaatatgcattttcaacttaccaaaattcaatattcattaataattatgtccttcttcttaacacaatgacttagagattgacactttaacttcgcttaccccatccagacttatatgccattgttatcattttctaaacttctctctatatttgaaactccaaaagacattattaatatttttctagagtcaacatccatatctacacattactattatgtgttttctacatttctgatcatccatctagatcatttttcttcagcgtgaagaacatcctttagtgttttccttcagcatggctctgctggtgtcatattctctcaggagtgtgtgtacatttgtgtgtgcaagcacgtgtgtgcatatgtgtgattgtgcatgtttgcatgcacatgtgtgcatgcatgtgtgtgcatgtgtgtgtatgcatgtgtatgtgtctgaaaatttctatatttatccttcattcatgaaacatattttgactgggtattgaattctgcactggcaattgttttctttcagcacattacagatgacagtaagtctatcattccattgtgttttggcttcatttgtttctatttagaagtaacctataacctaactattgcaccattgtataatctttttgtattctggattttttaaatgtttcttttcctttgatttacagcagttttattaggatgtatctaggtgtgaattcatttttatttatcttattggggttcgtatgggcttcttgaatctttggcttgctgtttttcattagttttggagtgtgggctgtgtactacctaggcagtggggagctactgaggctcttgaacagggaactaatatgtttaaatttgtgattaataataatggtgaaaatgatagccacaattttgcatggactcagcattttgccaaacatttcatctcttttcatcctcacaactctgacctagaaattattatgcccattttattatttttttaatatattggagcttttcaagatgcctgtttacagttgagggagtcaaagcatagagtcaagtcactacccaaaggcacacagtcagtaagtggcaaagccaagattgggggaagccaggcctgtctgactccagttactgtggcatagccactagccacgtgtggccatttaggtgaaattaaatataatgtaaaattcagtccctcagtcacatgagccacacttcaagtgctcaatagccagatgtggccagtgtccaccctatttgacagtatggagttagagcacttcatcattgcagaaagttctaccagacagtgctgccccaccacttggtaaccctctcacaggaccatgaaggatgttctggaaggaaataaattagaggcaaggaggcgtcacggccaaaggtgctcagggcctagcctcagaccatgtgtattagtccgttttcacaccgctgttaaagacacacccgaaactgggaagaaaaagaggtttaattggacttacagttccacatggctagggaggcctcagaatcatggcgggaggcgaaaggcacttcttacatggcggtggcaagggaaaaataaggaagaaacaaaagtggaaacccctgataaacccgtcaatttcgtgagacttattcaccatcaggagaacagcacgggaaagtccggcccccatgattcagttacctccccctgggtcccgcccacaacacttaggaattctgggagatacaattgaagttgagatttgggtggacacacagccaaaccctatcaccatgcacagaggaggagctcaataaataaatctctgacagctggtgccaaaggcctgctgtgtggcagtgatatgaagaacaggactgccagagctggggctgggggcggggaggccagtcattgagaggaggagccagaacagagcccaggacagcctctgctttcgcagcatttgaaaaacgtccgccgaaacagaagctggggtatgtttacacctgagaggatgtaagtgaggaaactgaggcccagcgagcttagccggccttcccgggaaacagctcactggggactggctgcaccctgccactcagaagaaagctttacaggttgctctgggtgttttacatgaaatctgtgtgacccctctctagccccctaataaaccacttgtgaggctgtttcagaacaaaatcctctcatctaggagagtttgtctcatttcctgcaagtgcctgagccctggctcagcagatgcccaaaatgttcatggttcagacatgaactgagcagctgcagggtcctgtaatggccagcagagggcagcaccgaacacgcccaagctcacctcgagttgcccattactcgagcaagcgggggaaaatgggcaagtttccccactttaaacgccttcttttgcaggctacaattctttactagccattgcttagctcccagagcagtttcccttggtaagtgtgctagaagtggtagcaataaacagttacaataataaacccagcagttaacatttaccaagtgcccacgatgggcggcagttccttatggtgttaggatgactctgtatagtggctactgtcatccacctgttctaggtcacaacatctaacacacttatagagcccttacgaagcgctgtcactattccaaactttttaaaatccccacaataactctgcgaagagggaactagtatcaccccatttgacagataaggacactgaatcacagagcagtgaaatgactttgctgaggtcatacagcttgctagggaccgggctgggattagagcctggggtaggacaaatattgagcccagggtgcagagcccagccctttcccccaacggacagtgcccccctagcctggctccaccccgcgcacgcctgtgacccctgccacatgggctgcagctgtgcctacccctctgggaccccccacggccattagacatcctagaggaatctccccagagtgcattatgatcacattagcagcaagtactcgctttcatcgtcatttcaggttgaagagaagcttcaggaggattccagaaggaaattgcttcagctgcaagaaatggggaacagagagagcgtcattaaaatcaatttggagagggcagtaggtcaggtaggcatgttccagagcccccctcattggcccacgctctccaatgattgcacccaagcagccagtgggggtgagagaggaggacgcccaaggtagaaagacagacgtgcgttaattctcccatttatctcatgagcagaggctgtctgcagctccccacccccatggacatcgcttaacaggtttctgctgctgggaggcctcccactcgaatagtttacgatgacccgagacccggaccaggcagccaatcccggctcgatgcctgcccccagttaaccgagctccttgcccccagtggtgtttctagcattttctccttaatgtttttagtcctgacatttaccacaatctttcttccccttgggccccagcagacattacagacagtgtctataaggaaatgccacttttcttaataaggtaaaaccctggagtgtccaaagtgcgtgctggatggagaagctcccggctgtgggtgagccactccgacctggtctggaggtgctgtttctttgatgctgtggcctgaaatcgccggtggcccttcctggcaaatgtgacacagtcatgggggccggaatgtgcagacgaaagtttaccaaaagctaagggaaagcaaacaggaaaccaagatgggagggcatatgaccctgaggaatgtggtcccccaggggcagcccaccctagattcctccacaggggtccctctcctggaaaccatgactccaggggatccacagaatggtttgcacacacacgtgtgtgtgcgtgtgtgtgtgtgtattactgggaaggagggccccccatgtctcccactgggttctcaggagggtctgtgaactaccaagaaaggttaaaagccaggatctctcaaaccacccagctcagctcccaaagcccttccattttctaccatccaagccttaccaggcagtgtgaccaggcctttgtccctgtaccctaaaattcaaatattcaccactgtaaccgccagcaccatttctcctgtgggggcgccagccccttatcaagggcagagaacctgcctgtctgggcctcttcctgtgcacattggctacccccaatcttccccctaacacatacctgatttgagggtctgacccgtgctccttgcccaagggccaaggttcttgttatagctctgggcagaggtcatccaggaggagccctggaggtcctgagactgctccaggtctagacttgagagaaaggacaagccctctctctgcctcccagtgccttccctctcctgtatctccaaggccctgctccctgtccaatagtctgcccttccccagccaagtgaccccaggcccgaggccatgtctaagatgacctctccctcccaatggccctgggcagccattcctgtggggagcccctgatggcaatgggggaccatcattcatagggcttcctctacacagtcaattctttgggtgagctgggaccctccacttggccatgaaaccagaggatggctttgagaacctcatgtcacctggtcttctcctggcagggtcactgcagagatgtccgtaagacgtttcccattagaactcccctgtgcagtaaatacctgtgtcttgggccccaggttgaggcagtagcccttttggtcccttcaaggctctgctttggagtatttaataaccacgttttgccagtgaactggagactcacgccaggggctgccatgttggtaaattctcagagaaagtcgggctcctttttacctctaactactaatggaatcaggacaccttggacttgtcattctgtaagtccggacttaatgtaactgctatttcatcagccttaacctgaaaacactagcacccaggaggggctcagtgaaagccactagaagtagaggcccttggcttaaggtgatgtttctgtgtacaggcatccagcaaaggttagttgggtgtctgagtgtctcctctacaccaggcaccgtagtaggctccagggataccgagatgaacagagtggacatagtcttcaggactcttatgggctcaggcatgaaatggagaaagggagaacactctcctctccccgggcttccttgctgactacacaatttacttggactgacagcctcaatatttatttcacagtctggtgccaacttagcaattacggaagagcgctcccggccccagacttcccattggataattggcagcaagaggctcttctgagggtttgagacatgtgtgtgcactgaccacaggcatcgttcgggttaggcaggcgtgcctaaaaagtaattaaagcctgctgttctcttttcttctgtgggtcccgccactccccgtgagcggtgaagattctgataacgcggaatggtcattcaggcgtgcaaaccctgctaagtggtgtttcccgcaccctgccatggaaacgctgcccccacttgccggcccctgctgaccccctgacactgttgccccctctctgctgcagctggagcacttcagaagtcaagtcatcaaggccacctatggacgggcgaagccgttccgggacaagcccgtcaccgaccaacaggttagtctgccgtccctgccacgtggctccttcactttcctcttcttcttcttcgtggatctggattccagaccctgggagcatatgtttctgtttttgttggtggcatatttttcacactgttgctacaccataaagatttgttttgattttatgggatttcctggcttttaaagtaaaagccagttaaaactcccttgaaatgtgtctgtgaaaatcaaattaaaccattcgggcttacttctggtctccagacatgcatgtttcgcctccattagcactgggagaaagggagccgcctccccacagccagtgcgttctggcgcgttccttcagaggagaaaagttgacagtggcagtgagggtggatgtctggctgtaatgattgccttgctgttcttccactacactttctagccccctgtgtcaaagcacagatgggaaaatgtgccgtgggctgctctcagtgggtgtgggagaacctgacctgctgcttatgagcccataatatcaggctcagtgttctgaatccctatacaacacagaagaatctggaacaaactcagggccacaagacaggcctttggatcataaaaataatctctgatcggcaaggagtggtggctcatgcctgtaatgccagcactttgagaggccgaggcgggtggatcacctcaggtcgggagttcgaaaccagcctgaccaacatggtaaaaccccatctctattaaaaatacaaaattagccgggcatggtggcgcgtgcctgtaatctcagctacttcagaggctgaggcaggagaatcgcttgaacccaggaggcggaggttgcggtgagccgagatcaaaccattgcactccagcctgggcaacaagagtgaaactccgtcgcaaaaaaaaaaaaaagaaaagaaaaaagaaaagagaatctctgattctgggactcattccctggtgacaggaccaacgtcccccttgacagccatcaccaagacatatcaggacctctgtcctcccgtgcttagacagggacttaagttgcatctctcccctctcccattccccttccctcagggccccccacccctgtatgttacatcttttttttttttttcctttttctttttctcaccagttaatagagaaaattacccaggtcactgaggacaacatcaattttcagcagaaaaagtggaccctccagaaagagacccagctgagcaactccaagcaggaggagaccaccgagaacatcgagaagctgaggacgtcgctggacagctgccaggtggcccctccttacgctttccacaaatggtctctttgtctaatttttgtgcggcttatttgggaaattgcccagcttttttggagcaagttgggcagaaatgcttggcttttctatccactttttcctcttgttggagaaacttgttggagaagaaaaaacaaagggcctaaaaaaatgcctcccgggagaacttggcgtgtccaaaaaagatgcctgagcatcttcaattactgactttgagcggcccgcatccccagccaaaaagaaattgttttcatagcccctatgttatttccagagaaaccaaagaaacattcctgctttttatttgcattttcttgttttggcccagccacaaaaggcggtttccacaccgttgcttttgactctggaggagcagggacgggaggacttggccacagccctgcggcccccaccctgggacatggcttatcagagcaggcggtggcttctgctttctctggaaatcagcagctcctgtttggggagtttgtgcaaatgctggcttgtcagcactctttcaaatcaggaaaccacgctttccgaccagcttgtgtgttgatcttggcaggaattctgacgaatggaaaaaagaagtagccacatttgcttctcattgcagccaaactgttgatggtactttggctctggggtttcatagacctaaaagggggttcgctttgaccatcaaaagtccaaattagagtattaaaaaaaaacctgtcaaaacataaaaattttaaaaaagaaaaaaactgagtcctcccaaggcggccaatacgtggcgctgcctgcttcgtggcagagtcaagaacgctgttcctcgaaggtcacgtcaggggctatttctggccacagggcctgggctcctcatgatctcacctctttgcaggcttgcatgaaaatatcctgttgcagccatgacctgaagaaggaggtcgaccttcttcagcacctccaggtgagcccacctgtctcggggctccagaaggtggtgctggacgtcctgaggcacgcgctgtcctggctggaggaggtggagcagctcctccgggacctcgggatcctgccctccagccccaacaaaggttactgggactttttttctcacatggttgcatgactctaaaatgtcgcgttgaatctcagcatgatgggacatctgttgaggaagtcttcctgggtatctggccaagtctattcccttctccagaaccccctgcttctctgcttgaggcgtaattttccattaaaaaaaaaaacacacacatacaagtgagacacgataactgaagaaaaatgaaacaaaacagaggcaaaaggaaaattaaatcgaaattatgcaaagtctaattacgctgtttaacctccaaggcattttcccatggaaataaccgcgtgattccaggcaagtgacttaccctgtctatgcctcagtttccctatctgtaaaatgaggctaatagggagtacccaccctttagggctgttgtgatcattaaaatgcatgaatatatggaaagtacttggaatagtacctggcacacaataggcattactgaatgtttattgacttttaatttgacaaaaaaatagtgtcacgttaccctcgattttctttggtttattcctaatggtacgtcatccatgtcagtagacacagacctacatcatcgctgttaccgacggcagttactgattccattgtgtaggatgtgccattgttttagacaatcccctatcatgggcacttaggtgatttccagtttttcacactcataaatcatgctgggatgaacattgttgcacacatacctgctcatattatctttattctcctagaggtggagaggtatgaatcactttctttcaacaaatagtgattgcatgcatgcttaccagaggccacatgttgtgcagggcagagacgtaacggggtcaggaacaggtagaatcaggtcatgggtatatggttcactgtaaaattcttccaatatgtccatacatttgaaattttttataataaaatactggggaaaaaaacaggccctccaagagcttatggtctcagggggaaggatgaggtgggcattaatgggaaaatcactcgaacaaacatgaaagttgagtggtgacaattgctatgaagtgcagggttcgatctggtcagggagagcagggcatctgcaggatgcatcggagttgttgccaaagaaaggggagagagcattctgagtacaggagcagcgtggtggcaggggagcatggagagcacaaggggctaacagaaatgggagcttcccagggccatgcatgtggggtctcgcagggccctgataagaagctttattctaagggcagagagaagcctgtgaaaggccttaagtaaggagctggacaggcttgcattctgagacaatcatcttggtggcaagtggacaacgtcctggagggtgggcagcatggtgccccaggagccacttggcgggctgccgtaagagatgacaaggccaccctagggcagggtggggatggagaaagaagattcaggggcgagtaagaggtaaatcaacaggcctcagtggtaggactggatggttggaaggaaagtgacagagagtcaacaagacctctaggtttctggtgtgtgtaaaagacggatgtgatttctttgctaaaactcagagcaaggaatgcaggatgaggcccaggtttgagggggaagaggagtgtgaggtgcctgtgagacatctaagatgagatgcccaagagacagctgtttccccaggtgtcttgtctggggataggtaataatgatgtatcctcagcacccagagagcatgtgccacacagcgggggcctaatacatatctgtgggttggagggatggatggaaggaagtgcagatggatggatggacggacggatggaagaaaggatggatggaagcattggtgggtgggtggatggatggatggacggacgggtggaagaaagaatggatggaagggtgagtgggtgggtgggtggattgatggatggatggatggatggatggatggatggatggatggatgaaaggatggatggaagtgtgggtgggtgggtggatggatgggaggaagggtgggtggatagaagggtgggtgggtctgtgggtggatgaatggatggatagaagacaggaaggcaggaaggaaggcaggagggaaggcaggagggaaggcaggaaggaaggcaggagggaaggcaggaaggaaggcaggagggaaggcaggaaggcaggcaagcaggcaagcaggcaggaaggaaggaagattaaagccatagatatgaatggtatcagttaggaagattatttattcttcagtcttgaagaacagccagagaactttgctccatgttttgcctgatgtcatgtaagctcatgacctacatgaaagtaacgagagagaagggaaagagcacagggccgcaccttaaggaactccaacattttgaagcttgttgctactccttcttgccaaatcaccctccagagagcctgcatcaattttatattctttccacaatgaataagaatagagaagtgattttcaaccctggcacttcaacatctgcagcaggatgcttccaaagtatccagaaggtggggtaacattcttaaaaagcaaaagcaaaaccaacattaatttttatgtaggaaccttcccctcatcatatagcagagagcgttactgttcttgcaatcaaggcagagtcgtgagcttacttgaaataaggtaaaacatggagcagagttctcgttgttcttcaagactggaactaaaacaaagaccatgatctccatcctggcaataatagagccaagctacgtgtgcactgtccccttcccactcccaagaccattttagtcatctagactaagtctataaatctagtcatatattattgttaagaaatgtgggttgttgccaggtgtagtggctcatgcctgtgatcccatcaacataagaggctgaggcaggaggatcatttaaggcttgaagttcaagaccaacctgggcaacatcgtgaaacccctcatctccaaaaaatttaaaaaataataataaattagccaggcatggtggcacaggcctgtagtcccagctactcatgaggctgagccaggagaatcccttgaggctaagatttcaaggctgcagtgagctatgattactccactgcactgcagcctgtgtgatagtgagaccttgtctaaaaataaataaacacggattgtaaagttaagctttcaggccagtaattccagcagggctaagaaagactgattttaggcaagcattcctcagaccagccattttcttctcctgacttcatggagtcgtgagatttgaacaacattaagcaggtttctgcagaatccctcccttgttaacacgcaccctgggtcaacaagaaggggataaagaaaacagtatttccaaactactggtctcctttcttgatgcccttgccccgcccccaactaacctcttggaataatgttccatggaacagtcattggggaaacggtggtctgctggctacatattctgtgattacaactagttggttctaagaactcaggaaaaaaagaatagagaataacagaaagttcagtaagcagggcccatcttttgtccactcagcagaagaggaagttgatggtaaaaggcattttctcttctaatacaagcaatattacgtcaagcgcccaaaagactaaaagaaaagggtaagctagcgtatgccccatattctctactcttgtacctaattcctagcccagagctaatccagaaggaggagcgggaagaggaagatgaggaggaaggatggggaggaggagggaagaggaggaaggaggagggcgatgatgatggtgatgatggtgattatggtgacgatgatagtcattcatcactgaggacttatattctagatacggttctcagcattttatacacatgatctcatttcatcctcacagtaattctatgagttaataatttgcccattttcctcattttagaaatgaggaaactggctcaaagctggttttctcattactccaccaggataaggtgatttgaggcacttcatgttacagaggctgacagggagtccccagtctattcatcgccatcctgcacactcccaggagctgcctgcgtttctagctcctaagagaagggtagaaagcatgggttgtttagctcctcctggggatttagcactgtgttcggtgtttcacacgcattgtgtacttttatcctcccacctacccagtgaggcaggtatgattaccatctttattttatttatcttttttttttttttttttttttttttgagtaaaagtcttgcgttgttgcccagactggagtgcagtggcatgatttcagctcattgcaatctccatctcccaggctcaagcgatccttccacctcagcctcccaagtagctgggactacaggcgtgtgccaccacgccacctaatttttgtgttttttgtagagacgcggtttcgtcatgttgcccaaactggtctcaaattcctgggctcaatcaacccactcaactcccaaagtgctggtattaccagcgtgagccactgcgcccagccttcatttgaaaagtaaagaaactgagacacagtaacgttaaaaagttgcccagagtcacacagctggtacattagggttaagactcaaactgaggtctttgtgaccctaacacctgtgtcttccctatgaccccctgccccttcacccccaccccctgcacacatacacacttcctctgacaatgcagcaatgtaccaggcacatgcccagtccctagagaatgggtgctgtcatcggctcaggcagtgacagagctaagagttgtctttccctaagctaaaccgcatctgattcctaccctgagccataaccacagaaagccccatttgtatcacagtgatgttccaagctgggactctgggtaccactgccaaggcttgaatttcagctgtgcacctactagctgtgtgggcagttacgtgacgtggctgcgcctccatttacttgctcgtgaaatggccatccagtctcctagcggcatatgaggactgagtgatgggatacatgcatggcagtgctggtcacagttagctcgtaatcggtgggggctgctgtcatcgtcagcctcaaatactggttgacttcatctgacctaaacatgggtagccaccaggcaggtaggcatgtggaccgcatagcctggtttacttgcacccaggtaacatcctctggagcctctgccctgtctccatttagcagcaaatggggtttctttagccctaagccctcagttgggttgaagccaagagccctttctagaggcctcctccttagaatctgacagtgggcctcgggtcccggctgccaagtggccaagctgcaactcagtccacgcccctccaacctcaaactccctgctcttgaccaccaggctacctgccttttagaacatcctcctaagagataaaacacgcgtcacaaactaggatggaaatcctgaaacgaatcccccaggggaatccaggcggggtaaacgtcagggaaatgacttgtggtgttgttgggagatgtcacgtgcagcccacaaggtgaggcctgctggggtccagtgtgttcggaagggtggaggatttgctgtgtggttcagctgggaggataagaatgtttaggcggcaccttgaaagtcagctgaatactcctcctgcctggtttctcagggttcctctgataagggaaggaaaggattttttacatttttctctgcaagctccgtcgtttgtgtctatttctgcaagactttgttacaaataaaagactcttcttgcatgcatggcaaatcactcaactatccaagatacactgtgtctttaactgaaaagaaagcaagttgcaatacaatatgcttggtgtgctttttttttttttaaatgtcagtatctgagcaaaagaacaaccttgagaaaaagacatcaaactgttaggagtattatcccagcagggtgggattgcactggaccttgacttccattcagttgttcaacaactgttcattgagggcccctgtgtgccagccactgtgcagaacatgaagacgcagtggcaaacacttcccacattatgaatttctgtaacatttgggtttttataaccaacatttataacttttgtaaacagaagtataagaaagacttgttccttcccccaaagagcaaaatccccattatgattacagttagtcatctaatctagaaatagaaatgtgatcaaatactggcctccccttcagcatcctcagctacctctccccttagtcctcctcagatcccaaccatgatttcatccttcccctttgattcctgggtcacacgttgcagccgagcaaaatcccagactcatcccaacagagcctccacaaatccctgtattcaccaggtccagtgggccaagccaatgtcagcccggccatctcacctcctccgccatcttggtatccttgcaatgcacctctccaacgcaccaacccaaccctgtactctcaagcctccaaaccctttgaaaagagattgacagatctaggtctgaattctgattctaacacttaccagctctgtagcttaaccttggggagcttctgtcgtttcacctataaatatgaacatacttccttaccaggttgtttataatgattagaaaaacgtatcaaactcttggcatagcactggcacgcaccaggtctgctattattataatattgctgttctcacgcttctgtgctggaaatcctccgaatggtgcattgccccacacaagaacatgttctcctcacttcctttttctctcttggcccaccttttattccttccctccattatccccactaggtcttcctcctacatgcagcacgtaccctgccctgtctcccctttcctctccttcccagggaccttgtgcacaaattcttctttctttggcgtcagcggcctttcttttcctcttagttccttccctttgccatcaaaggggcacttcaagatggctgtaccatcctgaaaaaaatcattcttctctggaatccatcgcttctttcgctccttttcaattgctcttactcctgtcttcacctgtgatctttaagaagcgtgttgcaccctcggtcttcattgccagcttcttggcctttctgccaagtaactgacacgggccccctgcagcactgactaggccaccaccctctcggggactgtgtctctgacctgcccaacgctcttcattctcttttttgaaaccctttaggcgctctgcttccctcctgatcttttccattcattcccagcagcccccttcaccaactcctatccctaacgagggtgttttctcctgtgcagtcagcccttggtccaccccatctcctttctcatgaagaaactctgcacttccgggcttccccagccactcctatgtgttttccacacggacgcctctgcaggaggggctgccaggaaagtggtgcagggagtccagccaaggcagtaggtggggtccctggccaggggccatggccaccaggaggaagggggcctctttcttcattcacacaaggaccctggatgggctgggctgggccggcattaccgattggcatgtccggctctctgctgaccctccctccccagagtcctgccagtgcctcaaattcagcatgtctgaaacagcctgggggctccttctctctccctgccacaccccaccgcaaccccaacctgtctctctcccgtctgatgacgaggccaccattctacccctttaaaaggctttccctttcttccctctcatcctcacttctcccaccctcagttagaggatcagcactgaatacctgggcgtctctcgggcccttagcggagctccctgcctctcactcagaggaggggagcttatcacaggcaacatccaggatcgtctggcgacatttttggttgtcaaaactggggtggggtgagtaggggtgcccctggcatccagtgggtagagaccaggaatgctactaaccatcccacaatgcctaagacagccccaacagcaaagacttgacaatatcagcagtgcaataccagcaatacggcccgacatagcagcagtgctccagcaaagaaaccctgccagctccagcctctcgaatgcagcccagctatttttctttaaaaaaaaaaacaacgctcttcatcaggccacttcactgttctgtcagccgctggaataggagtgactcagacctcgagtcacaccaattagtcttggctcaaccactggcctgctgtgtggcgttgggcaggcctgcgtctcagaacgccactgcctcatctataaattggggacccactgggcacatttcagtcatgtttaaatcaagtttcctctctcaagccgacggtttcaggagtgtcacggcttgacctcacccttccatgcctcctccactgtctgctcctccctctcccatcatctactccagcccaagtaagctcagcacttcccgggaggagcactgccttttccaaatcccacccccaccacccccacatcccggtgtgaaactgtggcttcctgtgactattgtaacaaatgaccacaagagactggcttaaaacaacacattattctcttagcattcaggattaattcagtttcactgggctaaagttccttccggaggctctagagcagtatccgtttcctggccttcttcagcctctagagcttcattccttgcattccttggctcatggccccttcctccatcttcaaagccagcgatgtggcatcttccagtctctgcttccatcacatcaccttcccctctgtctgtggtcaagcctccgtctgtctccttataagaagccatgtgatgacattgggtccacccagataatccaggataacaccccatctcgaaatccttaacttaatcgtatttgccaagctctttttgccctgtacggtcacacccacaggttccagggattcggacctggaatcgtagggggtcatcattcagccccgcgcacccctgttctgaagcgccctcccccggctctctgaattctgcccacccaacagcatccacacccagtagttcttcaaccaagtggtcttactcgctcactccaggtgaatgatctccccctcctctgacaccctcaccctcccctctccttcagcagtcactcacatgccacctggggtcactgcatgtttccagcaggcatttacaccttgtctttcggactgaactgtaagcccctggaggtcttggctttagaccatcccccacactcagcaccatgcttcacacacagtagacagtaaataggtgttctgttgatgggttgttttccacctccaaaaagaaagttggatgtgagctcaaccaaggcttatcaactactttatttttatttttatttttttgagactgagtctcgctctgtcacctgagcgggaatgcagtggcacaatctgggctcactgcaacctctgccttccagtttcaagcgattctcatgcctcagcctcccaagtagctggaattacaaacatgcgccaccacacccagctagtttttgtatttttagtggagatggggttttatcacgctggccagccaggctagtctcgagctcctgacctcaggtgatctgcccatctcagcctcccaaagtgctggggttacaggtgtgaacctccatgcccagcctaagccaccgtgcccggctgcttatcaactactttaaaaccacaggttggatggcagctcacgttgttttgatgggatggcaacgttgctttcatccacctgtctgcaagctttggagttgaattgatacttacattcttcctgcttctctttttttaagggttctctttgtatctgatatatcttctggaacattataaaaaacttatgagccaggcccaggaacttcaggtaattcttttaatttctttttttccaaagttcatttcggcccctggttggcatttatatagcactgtgcatttgaaacctgttttttctttatcagctagtccagtccacaccctccaataggtgaaatgatttcttcatttgcacacaaagaggtacagaaaaggttggctaagatctcccaggagggtaaggacaatgacagggtgctgccctctggcctcctgggccaaccacactgtttgttttcctctgtcaaaggcccagaagacttaatgccatcagattttttttttttgagtctcgctctgttgcccagactggagtacagtggtgcaatctcggctcattgcaacctctgcctcccgggttcaagtgattctcctgcttcagctttctgagtagctgggattacaggcgcctgccaccatgtgttgctaatttttgtatttttagtagagacagggtttcattatgttggccaggctggtcttgaactcctgacctcaagtgatccacccacctcagcttcccaaagtgctgggattacaggcgtgagccactgcaccagccttaatgccatcagattttgaaaactgtgtttactaaatccagtggacaaagtacagctatctatagcacaggcagcagaattactaaaagaaaagaaatattctagaggcaaatgagctttacgggttatatcattctgatagctattgccataatagtattatataataaacaaccacaaaacttcagcggcattcagcaattgctatttactcctcacgtgtctggggtcagtggcaaggcggctctgctgaccttggatgggcccacccacttgtctgggtgttagctggcctttggttgatctagactggcctcagctggagtgactcagctccctgtgtctctcatcccccagcaagcaagcctaggctgttctcatggagactacgaggtataaaagaaagtggcccaatcacatagtgtttttcaaccttctgcttgtgttatgtctgctaagatcccattggccagaacaagtcacatggctgagttcagtgtctggaggcaaaatatgggcgggcactgcaagttacatagccctagacatggatagagtggggtaaagaagggaccaccatgccaatcagccacagaggcttgagtccagggattggcaactttctctgtaaagggccagatggtaaatattttatgctttgcagaccatattcatacctcttccactctgctatggtaaaatgaaagtagccatagacaatatgtaagcaatggacatgataagcatggcactgttccaataaaactttatttacggcgggcacggtggctcatgcctgtaatcccagcgctttgggaggctgaggcgggtggatcacctgaggtcaggagttcgagaccagcctggccaacatggtaaaaccccatctctactaaaaataccaaaattagccaggtgtggtggtgggcacctgtaatctcagccactcaggaggctgaggcaggagaatcacttgaacccgggaggcagaggttgcggggaaccaagattgtgcccctgcactgcagcctgggcgacagagcaagacaccatctcaaaaaaaacaaaacaaaacaaaaacaccaccttatttacaaaagtatgcagtgggcccgatttggcctgtgggctgtagtttgtcaacccctggtctagtcccttctccttatttttcagataaggacaatttcagtgtcacacagctaatgggtgaagaatcaagacaaatgttcaagcgtcctggctcctacatgactgctttttttcctcacacccacctaccacttactgaacacctactatgtgctcagcactgtgctaaaagctttccatcattatctcacttaatcctcacaactctaaaagatcaatactgttattaacttcattttctaaatgaggaagcatctagaaacaactagagctgggattctttctagatccagagtctgaattcttaaccacagcatgctgtagtgttctgtgattttaagaaacttttgggtaaacctttgtacccagaaaggtaaacaattggtaaacaaatggggaaagactctttagttaggcctgtcccccatcagcatcggtttacttttctcacatttcagatcaagttcaacagttctcaggaaactcagcagtctttactgcaggaaaagctgcgggagcatctggcagagaaggagaagctgaacgaggagaggctagagcaagaggagaagctcaaagccaaaatcaggcaactgacggaagagaaggcggtaaggtggtccctgccatttgctttactactggaaactgatgaaatggccttttctatgggaaattgagggcatgtacttagacagagaaatctcagctactctgtttggtgccatgaaactaaattaattaaacagggtgaataattggggaggatttaacatgaagtttgaattctaaaactcacagcaaaatcaacttgaaaaggcagcatgattgaaatttcaggaaacggtgccttgtttgtgtatgtattgcagtcggctttatgagatctgagtcatcgctgcaggtcctggtttgtagctgacagactgtttctaaatgtgcgcaagatcaacttcagatgacaaatttcagtcttttgctttctctttatacatatcgggggaaacaaatggtcaaaattgctactgacttttctagaaatcaagccagttagaagatagcagcatctctaaaactcgaacgtgcccatgaattgtctggggatctggttaagatgcagattctgtctcagcaggcctgagacgctacattttcaacaagctcccagatggtactgacgctaccagtctgcagatccacattttcttagggcgaaggcttagaggaaggttttcccaaagtttcctgataagaaccatccagatgctttgctaaaaatgcagatcttggtctccaccctccagacccattaaatcagaacatctggagagggccaggaaactgtattatttaatgagctgattctcatcactgtcctagagttggcccttttttttcttaagatggggtcttgctctgttgcccaggctggagtgcaatagtgtgaccatagctcaccacagcctcgaactcccaggctgcagtggtcctcccacctcagcctcccaagtagctgggaccacaggcatatggcactacacccagctaattattatttttttttgtagagatgggatcttgcaatgttgcccaggctggtcttgaactcctgggctcaagtgaccctcccacctcagtctctcaagtagctgggaccacaggcacacaccaccacacccagctaatatttttattttttgtagaaatgaggtctctctctatgttgcccaggctggtctcagactcctggcatcaagtgatcctcccacctcagcctccaaaagttctgggattacaggtatgagccaccatacctgagggttggccctttttgatattcagggacccctcccatgaatttcactgtctttatgacttttgtcatttaggagattaaaaattactaatgccttgcacctctccccgccgactctccacattctgatcttagtggggtgagggtgtggcccctgctgtgggatttctaagcactcccgggtggtcgcaaagtgcagccacggttgcgagccactgttgtgggtgggtgtggagcagcgtgtgcatgctgcccctcctcacagccccctcaagacagcagccccccagatccaccggaccccaactcttcccagatatctcctctcttccccggaagagtactggacctgcccccttctccatctttccccagctccttctctaccacacacacctgccctccagacctctccctctttcatctccatcctcacatgtgtgtccagttaccccaaaacatcagtctcctcctccttcttctctttgcctctttctctgcttttctgcatttgcgaaataaaagattaaaaaagaagagccatctgaccaaatcatgtgcaatccgcataaaggtaatattaatgatagctataaatcaagatgggcacattttgaagggcatttagatacggaaaaagccagcaccgttccatagagaagaaaataaaaccagaaagtacctagaaatcttcaaaatcttcgcagaactctccaccgacttccttttttcttctctgattaccttctccttttaacatcggcatcccaaatgccttattttctctttttaattttggatggactttttcccttgtcagggtttggtatttcagccccaccatgttaaacactgcgttgggcgcctgcctagtcttcctagacaaccctggcgacactggcctggcagagtgttttaagagctggcgtcagcccctcttttaaacctgaaaacctcggtgcaccctaccctccttgcagagggaggaagcaacatcaggtccctgccagacagactgtgacactcgaaggtcgcccttcctctgatactcggattgatggacttgaccctggggactccttggaaagttacctcttggacttcagtgccaagtgtcctgactaaatgagccttccttagaccttctgactcccatcacctgccctttccgaaaatacatgtgtccagggtcattaatctcatgaatcttgacttgtttgaggactttgtttcaaagggaaaaaaaattctatgttcctttatcaatctaacattcttttcttattgccagttgttgacaacaatcccttggtttgtgcacacaccaatgggttagatcagggattggccaaattgtcccataaagagccagatagtaaatattttcagttttgcaggtcatatgctctctgctcttctgcaaaagcagccatagacaatacacagcaagcacagtgttccaataaaactttatttacaaaaacagaccagatttggtctgtaagccatagtttgctaacctctggtttagaacacaggcttcagaatcaaatgggtcagagttagaatccctcctcttgtgatttactagtaaactgggtggattcttgaatgtaagcctgtttcctcctctgcaaggtgggaagcatggttatcactgtgccaagcatttcgtgttcatcgtcgcatccacccctcacatcaacccaacacaggaagactattactgtctccgttgtacaggcagggaaactgaggctctggtagcttcacttccccagtgccttacagctggaaaggatcaacctggggctctaccctgggtctcctgactccagagcacatgctctgagctcctaggctctgctgcccacagcctccccaggggagtgcggtgaggagtgaagaggtagcacatgcagtgcctggcagcgtccaaattcctgccatggtaaccatgtctgttaaacaatggtcattggtttccaggctttggaggagtacattactcaagagagaaacagagcgaaagagactttagaggaagaacggaagagaatgcaagaactggagagcctcctggcccagcagaagaaggtatgtggctcagggagacagagtcagctcgagccccactgcagctaggaagggtggatctggggctctggtctgggcccgccggctctgagctccagggctgtgctgtccacagtcccctagggaggtgtagtctggagggaagaggaaacctgtgcggtgcctggcagagtccagtttcctcccatggtaaccatgtctattgaacaatgatcgttgactcaggctttggcgaaaagcattacccaggagaagaacagagtgaaggaagcattagaggaagagcagacaagagtccaagagctggaggaacgcttggcccgccagaaggaggtacgctcggggagatagagtcggctgagccccagtcggcttgagggccatgtggaaggaagttcagagcggcgatgatgggggtgagatcgtggtggagccttcctcgtggagtttgcgtttgggtgggctcagctactttgggaagcgtgggagactcaaggagggaaccctggagttgtagccttgacaaccagttgggaaaaaattgtaaacagtgtaaaacacagtcagagagagagagcgcttgggagacaagtaggaatggtgacatgggcgtcttctgtgttccaaagcacagaaacgggagaatgacagagtcatgggacctcagggctgcgtggaccctccaccagcatcctaaaagcctccagccttcagcaccaccactaaggaatgttctccaccccaggacagtccgtcccagcatggatgcctcaggccgacagaaagttttccctttaggttgagttgtgtcaaactcttacgccccggaggagtatcagtcctccgccctcccctgcgctcccacaagatacatctacttcctcttccacatgatgactcagatgtgtgaaaacaggggcgcccgcaccctgtgtctgctcctccccgggcccaagcgcccttgttcctcaggtccctcacaggactagagcctggccctggctgcctcctgtggcctgtgctgctctccagaagtcacagactggtagctcagcgactaaaaagggcctgtggaagttatatttggccccggaatattttactttgaattcataaaatctatttaaaagttcagatttccagcctctcccgaaaagtcagaaaatctagcccttgtttctacttagcaaaaatggactagaagccttaccgggtagcagcagtttgccagagtcctcaccactccccgttgcattaaacacagcccacgtcatttttggtatctgtccgggcttcataggcattgagtttgtcacccatcacccattttcttcctaaagggaggtggccagaaccactgttctccagccacggtagcctaggggaggactcctccctcccgcattgaagatattctacttctgttaatgcatccaaactagcttttgggaaagctctgtcacatttgtggattcatgtttagcttgtggtcaccctcagatccctgatcctttttcacatctgctttcatgaattcctcaatcctgacacagcacagaggagtgcgggctttgcagccagatgagacacaagttcaaatccgagctgggctacttcctggctgcagcagacctaccgctgcctcccttctcgaaggggcggctgtgggctcagatctagtgtataatggagggcctggcctgcggaatgattgccgagtaaacggcagctgttactactgtctctgctgccacttgtgcctcttcttctgtttgggcatttgtttttcttcaacactgactccttgagtaaaatccttgcccacccactgctgcaggagaaacaaaaagacctctgggcaaagcctgtgccatttgatctgacccaggacagagagacgtttacatgtcggttctcccttggcgtctctggcacaggtgtgccctgcagccctctcacagagcgtcactgaggtttgcccccaagtgatttctccaggggtggggatgaggaggagggtctccaaagagttacttgagtcaaatgccccaagatgtcaacagcaaaagcctggggaagattcttgaatttagagactttgaggccacggggctcaggagataaattcaagcttcattgcagaggatctgtggttgggtcaccccgcgtctgttaaaatgtcagcctacttctgacagaacttctctgtggcttcctatcgggggaatttgaaagagcagccccagccacaggctccattcaactgccagtggctatttgattttctttttttctgtctcccaggctggagtgcagcggcatgatcttggttcactgcaacctctgcctcccgggttcaaacgattctcatgcctcagcctcccaagtagctgggactacaggtgcaccaccatgcctggctaattttttgtatttctagtacagacggggtttcaccacgttggccaggctgctcttgaactcctggcctcaagtgatctgcctgccttggcctcccaaagtgctgggattacaggcgtgagccaccgctcccggcctgattttcttttcattagatcttccgccacatcatcagggtttttaaggtcaacagaatcactaggtcataatctgggtcttgaggtcatgttcaaagttaatccccattatctgttgtgaacttggaagcacagcaactgagcatgtagggcctgtgtgtgagccaggcaaggcctctcttaccaatagtacctgtcccgactgcagagaagccacccagaggaaggcctggcgagtgtagacgcagagtcagacacagcagagccaaccctaagtccctaggaagtgcctcaaagtctcttttacaattcacaggaaaatgtcctaccctgaaacccacttcaaaggatccaaataaacgtgaaattcttatgatgtcacttttcttctgctttaaggctggtgttgggacagcagagtgttagagttttgtcaactacttttcactgcaaagtatacaatatctcagccatattctggattaaacactttttacaggctcatctggggccctaaccagtggttataatggaaaccatgttccaagttctaaatgcctgacagtgaacctcgtgtttgaaagacaagccgttagaaaatagaggtggcccttctcatggtgactggaaacaggctggcagtgtatttcctttggtgatttgcattaagctgtttagttgaatagcttaccagcaagtaacttcccagacaaaactccttgattagggccactaaatactggccacactttcttccctacatcctaccagaacattgcttgtcccttctagaaattggtgtatcgtggctcattagtccaacatactgcccttctcttgaaactggattctgttggagagacttatttcaataatggaaattccattattaatgagactcttcttttgatcagagaggctgcctggcctcgtgataggaagctgcccccgctgctcccgggtgccctgtcgagagctctttattcaggctcagtgctttcctctgcgcaggcttcagatcctggcctcaccactgacaaagggtgtggctctgggccctctccgacttcctgctcctcggtttcctcatctgtaaaatgggccactctcagcacttctctgacagagttgctgtgagactgaagggctggccaggggcccaggtgtatttaatagccgccccaacactttggctgttattgttactattattattattattatcattatcattactagcaatttcccccctaaatgtgcaggccaccaagagcactggtcgttgattttcaggttttggagagcagcatagcccatgaaaaaagaaaagcaaaggaagccttggagtcggaaaagagaaaagttcaggatctggagaaccatttaacccaacagaaggaggtatgagcagcagcaggaaagaatcctctggaaggaactacaaagccagatccctgggagagtacagtgggaaatcgggcagatatcagagccatgcctccctttgaagtggccaagatctgccgtttactggctgtgtgacctccggcagatcgccacctccccatccctcagtttcctcatctgtgaaatgggaatgctaacagtccctgcctcatcggattagatgctctcaggtgtcaagtacataggactgcaccctgcatcctagagggccctcgggaagatttttctgctctctggttcagctacctaggaaagagggatcctcccaggagagaatcctgagtttcagccagggtcaggggcttagtgagcatcatcctcacagtagagcggcatgtgtgccacacctggcatggccaagggagaaagcactgctcctggcccggcctcctggtgtcatggactccggagcaggccctcccttgactggctgaggagtaaaagcacaaagagcacaaagagagatggcacaggtaggtgcatagtaagcacgtatggttgtcacatcagataagccccagggatcagtgccttctggaatggacgagaagatgggcaccccaggacagactgacaccagggaggaaaggaggggtcagagctggagacatccacatccacccaccccaatgccaccaacctagggacctggcccaccagacacacctgccccgagcagcatgaaaggcaggccctcaggtcagcctggacacccaggtcacaccctggaagtaagagctggggggccaggaggaggtcactcagggacccacatggcatctccatgagctgggcttcggggacagaggtggcacagacacacacgtgccagcccccacagaacttccagaaacagagctgatggctcagtgaacggttcgattcggtttcattcatccgcccataaatattcatttatccacccaccgatttcagtttcattcatccacccaccgtgggccaggcccggttctgggtgccacagacaccgcagtgagcaagacagaccagggccaggctgccagagcttccatcctagcgcaggggagacagacagcctgcggaagcaggggcggctccagggccacaagaccaaagctgagaagcaggctggagagtgcccgagggcaggaccgctcaggaagtgacattccagtgagaactggaagggaaaaggagcctgggggccagagaggaccactggataaagtggcacaggtgtgaaggtcaggacctgagcttgccaggaggtagacgggggagactgtgtgaggaatgaaaccaaagctggcccaagatgggaggcaccagggcgcagtggaaggaaataggtgggagaggtggggaaggaaccacagagcttggtgggctaaagggttcattctgggctcaaatctcagctctgccctaacaggctgtgtgaccctgggcatgccccttgccctctccatgccctcatctgccatgtgggtgtggtggcagaaccgccctagaggtgtaacatgaggagtcagtatattcatggcttgggatacacctgccctggtgaggtcagagtccaggtggggtgggcagttgagtgggcacagcagggtgggggctgcacagccttaagtgaagcccttggcagtgggacaataacaagcccatgagggaagtgaggtcagagtccaggtaggcagagggagcacagacatgctaaggggtgggatccaaactatggtcaccactgcccccagagcctcccttatacatacgagccagggatggggtcctgaagctcaggctacagccaggcagtgtcttgggctctgtgccagcctggatatgaacatataaacacatcttgctgggtgcgatggctcacgcctgtaatctcagcactttgggaggccaaggcagacagatcacttgaggttgggagttcaagaccagcctggccaacatggtgaaaccccatctctactagaaatacaaaaattagctgggcctggtggtgcacacctgtagtcccagctgctcgggaggctgaggcaggagaatctcttgaacctgggaggtggaggttgcagacagctgagagcacgccactgtactccagcttgggtgtcagagtgagactccatctcaaaaaaaattaaaattaaaataaaaaaatttttttaaaaagtctcctgcctccaagtgggcagggtttgaatcagggcccagaggccgagtagttaaggcaagggcactggtgtctaagcctgcaccactccttcctggtgctgtgaccttggaacactgcttgtctttatactgcctcggttacagcctgcgtttcctttcttgtgaaacagggataatcagatagatgctctctgggggtttgcagattggatgcactaatacattctgtgcacagggtcattgtgagtattttcatttgtaacacaccaagtagtgcataataagagaagggaaagagccctcaccacggggcatgcagaagagtgtgggtgaccttgtaggacaggcaggacttagctctccagggcacagattggaccatcttaagcaaagactcaacagtgagaaaaagccaggtctgcactgggagatgtggttgaggggggtgcctgggagttggatgtgcagaggcgggtagggtgggtgggtgccacacaggtaatgttaaaaccgggaacattgggaacattgtctttccttgagggccacacacacctcgagtctcatactgtcccttgaattaggatgttcccatctcctatcactgcatgccctgtaacgattttcattcatttttctttttgccaataatacctgtgcattaaagaaaatttagaagatatagacctgtgaaaagaacaaaataaaagttgccataatcccaattccccccaaaaaactgtcacttacatttcagtacatacccctctggtcttttgttgtacatatacacgtatatttaaaatccttttcttgtgaactttatgttggtgcgggggaggtgtataattgcaagagtttcaacagctgcagatagagtttttcaaaccctccctagctgtttacctcccagggcgtgtacaggtgagtctgggcctccagttccctccaggtctatggcgtttgtgttctcagctccaaactgacctagacaggaattttgaaaacccatggctttgtagactggaagtggctgcctgggtcctcatttggagccattggcatgggtctgcagggacagaaggcacctccccagcactgtctctcctgccccacctcccaaagggccaagtacttccaacaaaagccagcatcggtgccagcacatgccagtttatttagtaactcaatgccaaacaccaggacccaaccattcaccagcatgtcacttcctgaacaccagccctgaagtcttgaatgatgactcactctctcctttacacacgtgactaagatatggctcccgggttctcaccatggtgggcatgccatggttctcacctctgtccccagtgggtgctttgttctttgagatctttctctccaaccctgacttggtggcttccacggtgactcgtcctggtttccctttccagtgtcatttccctttgagggcacaggccctcaaaccactttcattgacttccagatctcagagagcaacattgcgtacgagaaacgcaaagcaaaggaggccatggagaaggaaaagaaaaaggtgcaagacctggagaatcgcttaaccaagcagaaagaggtatgagccgcagggagggagagacgagaggggcccagcacagcgaagggcagtgctctagagccaggctctgggttcaaatcctacctctccccatccctggctgggggacttcaggctagtaccttaccatctctgtgccttagtttccccacttatgaaatacactcaatacacacagatcaatctccttgagttgttgtgagacatgactgctgttatacacacagaacatatggagaggcacccagcactcagcactccgcatgtatgtgtcagctgcccatgttagcatggtgaactcatggctgggaagtggagggacaggatccgaagcctggactgtctgactccccaatgctaaatcttcatccctccttctctactacacttcagctttgtgtgggctcagctgcctggcttaagagaggagatgttggctgggcgcggtggctcgcacatgtaatcccagcattttgggaggctgaagtgggcagatcacctgaggtcaagagttcgagaccagcctggccaaaatggtgaaaccccatctctactaaaaacgcaaaaattagctgggcgtggtggcacgcgcctgtaatcccagctactcagaaggctgaggcaggagaatcgcttgaacctgggaggcggaggttgcagggagccgagattgccccattgcactccagcctgggtgacagagcaagactccatctcaaaaaaaaaaaaaaaaaaaaaagaaaagaaaaaaaaaaaaagagggatgttagggtatggatacctggatctctgatcaggctgatatcagttttcccagcagagtttgtcatcataattgtcatcaccttcataatcaaaatgcatttactgttatcactgagaattgtaaacgcagtaggaatagaagtggatttcgcacctgaccctgtcttgggtacctcataagcaatagggcataattcacttcgcctgagtcccagcagtacaaaacacacacacaatgaccaatatgtcaaagtcaaagcagttgataaacatgcagcctggcaatcatgggttaaatttaaatataggtgactatgacttcaaaggattttcaggaccagctaggactaaaaaggtctctattcacatcaaccttggatcattttcttcaaagaaaggtttgcaaacattagcatgcatttgaatctctggggaatttattttaaatgcctgtttcttggaccccaccccaagaaattctgaccccctgggtggaggacagactcaggaagctgcatgtttcataagcagcccaagtggcgctgatgcactttaaacaacgctgctctagggagaatagtccagaaggcacatctggatcgcacgtcagccctggacaccagtctttaagaggggccttgagtaactggcatgtgtccagagaaggcagacgagagttgggtgaagtgatgccggacttgtcagcccagggctgtcatggtcacagaggacccctgcagggaggcacatgctgcaggctgtgggagagcccgagaaaggcagtctcttcccaagcagccgtgtcccccagatgatgtatcatggatcctccgtgaaatacactatgggtaggcaaaaaggagaggttaaagttttaaaagtaggtaagttgggacataaaagggatccagaatgagactaatgaaaaaaaaaagtatatcatgaaatcaacgaatgagtcacaatttttactccagcaattacagtgcaagggaaggcccagctggttgtacaatttactagacaaaaatagaccaactgctcgtggaaatatgaccattcttgatactagactagagagaatctctcctaagggtcattacttagaggattctgcaagaagcaaccttctcaacaatatccttagaacagtaacaccagaaggtagagtcttggccgggcgcagtgactcacgcctgtaatcccagcactttgggaggccaaggtgggtggatcacctgaggtcaggagttcaggcccagcctgaccaacatggtgaaaccccgtctctactgaaaatacaaaaattagccaggcatggtggtgcatgcttgtaatcccagctacttgggaggctgaggcaggagaatcacttgaacccgggaggcagaggttgcaatgagtcaaggtcatgccattgcactccagcctgggcaatagagtgagactccttctcaaaaaaaaaaaaaaagaaagtggggtcttacggcatccctcaaagtagacaggtgacattaccctagacaagcaggaacaggacccagcccaggaattcaccatttaccaggaaaatccaaggaaatacaagtacagtcaggcagagagttgcttgtttgcacattattttatctgtacactcggaagagcaatcaaagattgatttcatccatataggcaaaataggaaagggagagaggagagaggaaaggaatttcaaacgcatgggaccggtgaactttgttctcctatccttggacaagctgctgagtagctgccagggagcaaagatggcaggctgcatggtctactcgtaagcagggcagcttcacagctcttcaaagaaacaattgcagtttgttgtgaattatttgggacccctggggtgcatcgctgagctgtacgtgacaagctactccgtggcatgcctgccagtgtccccagtgagcacctccataggccaggtctgcatgaggtcctccgtggaatatcccaacagtaacagcaaggttaagaccctgaaaaaggatcagacggagttaagcggaggtacacagaggatgcagcaactcccaggcaaggcttgcaggaataacacaatgaaaacggtatagggatttaatttattcaaaaaaaagtgttttctttcctgattataaaaaaaaacctgtcattctagaaaacttgaaaaaaaaaaaaaaacagaaaatcactccaaagaaaataataactaacatagagtccactgagcacagttgccactatcgacattttgatgtgattccttccagacagcctttgtgttgagcctcagcatcgatatcgataactaccgatttatgaccaagttagtgattgacactgtgacactgtgcacactgcttcggatgctatttttgatatttactatacgatgtgtcaaccttaaataatgagattctctaagcatagagtttattcgagctcaaagcttgaggacggcaacccagaaaacagacttcaaaagaatgagtcagtgttccaaagcagggaggtgaaagtttcactttgataggcagttaacaggatcgcagtgtcttccacacaaggtcagcacatgcggttatagccctttggttggttacagcttgctacattcctgggaaaattgctttactattccaggatgaggggtgatcatctgaaggagtcatctctggcgtggccagggctttcccactcatttacagaaaagaatagaagttgcaggtgcgtgctacgtgacccaggccacacagccacattcctctcgagtctcaaaataatttaaggtttcaaccgctttaagtttgaatgattttggccaggcacagtgactcacgcctgtaatcccagcactttgggaggtcgaggtgggaagatcacctgaggtcaggagttcaagaccagcctggccaacatggcaaaaccgcatctctgctaaaaatacaaaaattagccgggcgtggtggtgggtgcctgtaatcccggctactcaggaggctgaggcaggagaatcacttgaacctgggtggcagaggtttcagtgagctgagatcattccactgcactccagcctgggcaacagagcaagactccatctcaaaaaaaaaaaaaaaattgaatgatttcatgttgcgtagaatgtctcaatgtcatcgaacaatcttccatggcctgggtttgcactgtgctggatggaagccgatttcttttcttctcccctggggtggtttctcactcttcactagtgcagcagatgcccggctgacccaccctgtgcatcagtctttacgtccttaggaaaaattccctaaagtggagttgctgagtcacaggacatgcacattttcaggctcataatacacattcctgagtgagtgtctagaaaggtcacagcagtttgcacctccaccaacagagtttaagaatgcccagtactttgaatatattttaaattggattaaataatgttcgtaagatgcccagcacagtgccactcaagaagcccacacttcacattattgcaggagggactcagaatagaatgttgactatgaaagatcaaaagaatggggccaggcgcgttggcacacgcctgtaatcccagaatttgggaggccgaggcaggcggatcacgaggtcaagagatcgagaccagcctggccaacatggtgaaactccgtctctactaaaaatacaaaaattagctgggtgtggtagcgtgtgcctgtagtcccagctacttgggaggctgaagcaggtgaatcgcttgaacctgggaggcggaggttgcagtgagctgagatagcaccgttgcgctccagcccaggtgacaatgcgagactcctccgtctcaaaaaaaaaaaaaaaaaaaaaaggagaatgggttccgggaggagggataagagatgcccaggacagggccgctggagccctggaggaaaggggggtgtcctgaaggcaggtgttgcagtgaaggagagaagggactcagcacattcatcttggagaacagatttagagacagacatgacagccctcctcaaatatttaaagggctgtctcataaaagagaaataaaacatactcaatgagctccaggtgacagaactgagctcagagaccagaaatcacaaggagacagatctccgctgaatataaagacgagttctataataattggaaccttccagagaaggcatggactttgtgctttaaaagaatcgacagaataattagagaatagactttaccctgtccttgaaggtgggggataagggggctgggtaaatatgtattcctgaatgtctgttattttgctacttgtttttttgtctaggaattagaattaaaagagcaaaaagaggacgttttaaataataaattaagtgacgcactggccatggttgaagagactcagaaaacaaaggcaactgaaagtctaaaagcagagagcctcgccttgaaattaaatgaaacattagccgaactggaaactaccaagacaaaaatggtaagtcggtgccttccgggaacgggagaatttttctctcaatggaagattacagtgccacgagaatgtgtggtttagaccggggcttctcagcctcagcactgctgatgttctgggccaagtagctctttcctgtcaggggctgtcctgagcatcttaggatatttagcaccacctctgttctctacccaccagatgccaggagccctctccccacagtcgtgatcaccaaaaatgtcttcagacattgccaagtgtcccttaatggacccctaatgagaagcgttggtttagaacgaaatgtacacagagctaggatgccctctctgcacggtgttctgagatgttgtaatgcagggtcctcacaggatcagaacgcctggagagcctcaggattgagtgatgagtgacgattccacaggctttaagacaatgcattaaagtgtaggctcggcattcgaggccctccacaattagggctcgatgtgcattccctctgtcatccacacgttcaaccgacaggtttctgggcaaggaattcatgaaggtgaatctcccagaagagcacagagtaaatttcacgagggtgtggcgttggagagaacagctctgggtgtggaacgtggtgtagaccagaatcataaggagctgaccttggcgggagctgggggaggcgtggggggaagggagtctctggagagagttacgatggcaggacttgataactgctggcaggacgtgagcaccaaggagaggacagtgccgaaggagactgcacacttcaggccagggcgcctggggacctgatggcatagggacgacataaggatgggagtatggaggtctggggtcatggtggggggttctcttggagcgaccctcttttggagaagaggagacaagaggagtaaggcgaggatagggcatcaaagtccaaaagctcccgagatttgggtgcacaatagttttgggagagaaagcaagacaagagcctaatctggaaggcagcctcttaggtagggtccttggaagagcaggcatgtgtgagtgtctcgggcaaagaatgtatctgtcatgggtagatcagaggccaaggcccagcacgtcacctgggaatagggagcaggacagggtgaggtgggagcagaaggcgggcagtgaggaggaggtgctgggatggaaacgccaaggggagccttaggaggttgtaggcatgggaaagcagcagatttgccattcgggggtcattagtaattttttgtttttaagaaatgcaaattctggctgagcacagtggctcacacctgtaatctcagcactttgggaggccaaggtgggtggatcatctgaggtcaagagtttgagaccagcctggccaacatggcaaaaccccatctccactaaaaaaaaaatacaaaaattaatgggaggccgaggcgggcggatcatgaggtcaagagatcgagaccatcctggctaacatgatgaaaccctatctctactaaaaatgcaagaaaatagccaggcgtggtggcgggcgcctgtagtcccagctactcaggaggctgaggcaggagaatagtgtgaacccgggaggcggagcttgcagtgagccgagatcgcgccactgcactccagcctgggtgacagagagagactccgtctcaagaaaaaaaaaaattagctgagtgtgttggcgcacacctgtagttccagctactcaggaggctgaggcaggagaatcgcttgaacccaggaggcagaggttgcagtgagccaagatagtgccactgcactctaatgtgggtgacagagcaagactctgtctcaaaacaaacaacaacaacaacaaaaagtttacatttctagcggggaagagaaacaaagaaacaaaattaaaggcttcagggacaatgaaacagacgctggaacagaaagtgtctggggctactcctgataggtagtcagggagggcctctcagaggacgtgatgctggagctgagccctgagagtcaagaaggagttggccatgcaaggagctggggaagaagtgcacagggcagagggaactgcatgtgctaaggccctggggtggggcccagtttagcacctatgtgtgtgcccagggggcatattattgttgccgtcatacacagctcccaagacctcactgagtgactctctgtttcccagatcatggtggaagagcggctaatcctgcagcagaagatggtaaaggccctccaggatgagcaggaatcacagagacacgggtttgaagaagagatcatggaatataaggagcaaatcaaacagcacgcccagacaattgtgagcctcgaagagaaactccagaaagtcactcagcaccataaaaaaatagaaggcgagattgcaacattgaaggacaatgacccaggtaagtccgaagggaggccaaggaaatcttagtgttcggggcaggttctgattgtccgctgggtcccaacaggctgatggctaagaaaaaggccgtgcctcattcgaaagctcattcattctctgaggcccccttttgttcttgttacacaacgatgtcagaagccctccgaggcccaggttcagcagaagtcatggcaatgagttgggacatcctttgtgcctactcagtgagccggcgagacacacaggctaccggggctgtcagggccagcgagggcagcgcgaagtggaatcatcttttccacatgaaaacatctcatgcaggggcctttcaaaggtttctctctgccatcggccttttgcatcttcactaatgcactcattaccagccaggatttatcccttaaaaaattaaccctaaagaggctgaaaaaagaactcagacttgtgagcacttatttgccccaaatggccaaggtaagctgtattattgtaagctcttgaagaaagttctggaagtagaggactcaggccagggtatcccagcctcagccctgttgacatttggagcaggatcattttttcatggatgggactgtcctgggcactatcaggtgttagcagcctccctgtcctccatccatcagttgccagtggcacccctaccccagttgggacaaccaaaaatatctccagacattgcccaatgtcccctagaggcaaattcactcctgcttaagaaacatggctgtagtccccagcaagctggcaagccatcaggacttacctcattcattcactcactcagctctctcggtggagcttctgttatgttccaatctcatgtaggcactcaggatccaatgatggacaaaccagattttgtccccgtagtaacaaaattattgccctgacaggtgatccaggatgaatagggcaccatgacaaggacaaagagtggagttcagtttcccaatccagagtccaggtcagagggagggtgtctgagattgagctgggggccaggtcagtggctcacgcctgtaatcccagcacttccggaggccgaggccggcggatcactaggccaagagatcgagaccatcctggccaacatggtgaaaccccgtctctactaaaaatacaaaaattagccgggcctggtggcgcgcgcctgtagtccagctactcgggaggctgagacaggagaatcgcttgaacccgggaggcggagcttgcagtgagccgagatcgcgccattgcactccagcctagcaacaaagcgagactctgtctcaaaaaaaaaaaaaagaaagagagagattgagctgggacctgaagggtgacgtccaggtcagagggagggtgtttgagattgagctgggacctgaagggtgactgcatctttgtcacccccgtacttagaccagtatgcactccacaaatgttagttgaagggataaacaagtgagtgaacacgtgaggataaacaagtgagtgaacatgtgactgagtagtgagacaggacgctagaggcggtgcactgaggtgtaaatgggaggtgaggagaggaaggcgctaaacacagattcttcttccaagagagacaggcaggcggtgggaccaggggctgagactgcactgctcaccagcttagccaagtgggtcgccggcagcttccatcactccggtgcccctttccctgtctgtaagtggatttgatggcccctgccttctagagtagctgggaagattgcatggccacacacttggggagagcccccagcctgtgacatggcacacgtgcaggtctcacaaggtggagagggctgcaggtggaggcagggtttgtaagttgtgaaagacacaggtgtgcttgtaagcaaaggggaaggacagtttcctctcacaatgatcacatgtccctctgatacagccccaaaggaggaaaggccgcaagaccctctggtggctcccatgacagagagcagtgccaaagacatggcgtacgaacatctgatgtgagtacccgtgggtgtgtgagcgccaggcattctcaccggcaccacctgggtgggggcaaacaggcaaccagcccctacctgggccacattgtcagaagccaaacaaggagccgggcctgctgccttcccagtgctgcttccatttccccattccttcagcccagaccacattgtcagaagccaaacaaggagccaggcctgctgccttcccagtgctgcttccacttccccattccttcagcaaggcagggcagtgtcgtggaaagatttaggtagacctacattcagatcctcagactgttttctgctatttatagcagaatacccaaaactgggtaatttataaagaaaagagattcatttcttacagttatggagactgagaagtcccaggttgaggggttgcatctggtgagggccttcttgctgttggggctctgcagagtctgggagtggtgcagggcatcacatccaggggctgagcgtgctaactcaggtctccctgcctctttttataaatccacagtctcactgccatgataacccattaatccactaactcagtagtccacaaatctattaatccataattgtaccttcgtgacccaatcgctttataaaggccccacctctcaatactgccacattgggggttaagtttcaacttgagatttggaggggatgaacattcaaacatagcagatcccaactcaacactccagctgtgtgaccctgggcaagtcacgccacctcactgagccttagcttccacatttgtgaagtaaggctgtacatgcctagtgcttgggaaatctagctaatactgttattagctagttttcccgaggatcagctagaggcaagcccactcacaggtgttattaagcagacagagatttcaaacagtggagaccacttggtggggcggggccctgtaaagggtgagaagttaaggggtcggctaagtgaccttaaataaatgatttcaactctcctgaccctgaaagccagtgagtctacaaagaagtctatcctcaaagaactgacagttttcagagaaacaaacgtatgaatgggaaagatccagaaagcagcacgtaaagaaggaggcgccgatgggatgcagtggagggattcagaagctcccccaagaggagaaccacctgcctgacccttgcaccaaatcctagtgaccgaagtctaatgtcacagggtttttaccccaaaaagacaaggatactcagcctccgcattgtgaaaagttcctgactcctcctcctgtttaaaatctagaaacggtggtgcccatgacttggagaagactcagcaccacccagctctgctctggtccacttccttggcgtgtgaacatgcttgaattctaaggttttatcctcaagttggaagatttgtggttgcagccaagaacacactcacgtggacacacacgcatgcatgcacacacagaatatactatatctatgtagttattttcattctgatgatcaccagtctttttgtttgtttgtttgacatgcaacctgccagtgttttactttaattcataataaacacagtaccttctaaagtctgtataaggcggggcgcagtggttcacacctgtaatcccagcactttggaaggccgaggcgggtggatcacctgaagtcaggagtttgagaccagcctggccaacatggtgaaaccccgtctctactaaaaatgcaaaaattagccaggcatggtggcagatgcctgtagtcccagctacttgggaggctgaggcaggagaatcacttgaacctgggaggtggagtttgcagtgagctgagatcacgccactgcactccagcctgggcgacagagcaagactccgtctcaaaaaaataaaaataaataaaaaataaagtctttataagaagagcctggatttcaaaagcctgtgaactcaaatgaagtggcattaatacctgcaaagactaaggctcctaacccccttccaaaagggcaagacccactccctgcagcacacacatgacctatctccgccaggctgcagtttctcaacttgctgagacatgcaccctgtgttcttccagtcaaatccccaccaaggcgcctcccctgccattcctgctgggcgcccttcacctctccactgggcgcagcctccctcccatcaaccatcctgagtctcagggcaccaaacgtgtgctgccctccaggggtgtgggaggggaagttgtcccatcaccatcactgtccccctgttgcctgggcccctgttgcctgggccacacttccactggctcccagaagaacaccattcattcacatctggccccacctctctccaccaggaattcaaaggggctgctgagagaacaaagccacattgtcttcctctcttttttcttccctgtccccaaagaatccctgaacctccccaaaatagtcttcccatgtccctccaccatcagaagtccacaggcacatccattcatgatggtgggtagtgggtatcagtctcatgcaaggcatgtttgagccgcagactcaactcagccagatcctgtgttctatctcagtggattttcttttttctttctttctttttttttttcttagagatgggttcttgctctgccacccaggctggagtgcagccttcaactcctatgctcaagcaatcttcccacctcagcctcccgagtagctgggacaacagccacacaccactatgcctggctaattttttttttttttttttttgtagagacggggttctgacttatgtagcccaggctggtctcgaactcctgagctcaagtaattctccagccttggcctcccaaagtgctgggattacaagcacatgcctggtgcctggccttaatgtattttcttaaatgaggtgcatgaaaaaagtcgtttttcttttagagtttttgaagactgtcctcatcctttgctgggactggcgttgcatggaccgtgattgagaatctctttgcatttgtacttggcccctcctgacactcaggagataacatggagtttgagttgaactgacttcacctgtttttgtgaatttcagagatgacttattggctgctcagaaggaaattctgtctcagcaggaagtcatcatgaagttaaggaaagaccttaccgaagcccacagcagaatgtcggatttgagaggtttgaacaatttctggtgtctcttgacctcctgacccactcgagaaaggaaggagatgaggctaaagagtcggccgggcgcagtggcgcacgcctataatcccagcactttgggaggccaaggcagttggatcacaaggtcaggagttcaagaccagcctggccaatatggtgaaaacccacctctactaaaaatacaaaaattagctgggtgtggtggtgggcacctgtaatcccagctactcaggaggctgaggcagaggattgcttgaacccaggaggtggaggttgcagtgagctgagatcgcgccactgcactccagcctgagcgacaaagcgagactctgtctcaaaaaaaaaaaaaaaaaaaaaaaaagagttgaaaaccttggcataaaaaatcctgcttccctgtgctgtcgcagcacctttaactcagggtcagcaaaagccgtatcctggatatgtccctgattcctacccgcactgagtctctgactcaatgccaaggggcgcagggcacattctccagaggactttggacctctgcactgaaatgcaacttacttcttcagggataattttcctttagcacagatttgcttctggaagcaaaggcttggagggcaatcctgggatctccctgcagcaggccagtttgcacaagccccggcactcactagctttgggacctagggcaagggggcctctccaggccttctcttcctcagatgccaagtagagacaacacaccttcttcctacggttgacatggacatgagtggcccctagagtaggggcaaaataactgagttctgtgctgttctggacagacacaaacaatgccgccttcatattcctgctttgttcctccttgtctctgtgcttttacttctgcctccctccttcttgcatctgatagcagcctctctttcccatctctactctccctcaagccaaagggcataaacaggcaggagctggaagatggaactaagcccggggaagtggaggaagggaagagaatgctcttatcttgtccccatcccaaaccctacaggatatttgctccctgtagctattcctgttaacacccccaagacatttatggctgaggtttttttgtaataagatatgagaaagtgtggggtagaggctacaatgccaagttcacgggagatgttgggcccaattctatatctgctcactcttagttgcatgaccccaagtaagtcccttacctcattgagcctcagtttctgcatctgtgaagtaaggatgctaatagtagctaccttacacctgtagtccccgcactttgggagactgaggcgggtggatcacctgaggtcaggagtttgagaccagcctggccaacatggtgaaaccctgtctctactaaaaatacaaaaattagccagtcgtggtggcgcatgcccgtaatcccacgtacacaagaggctgaggcaggagaatcacttgaacccgggaggcagagacccccttaccggccctcctgtcactcgcaggggagctaaacgagaagcagaagatggaactggagcagaacgtggtgctggtccagcagcagagcaaggagctgagtgtgctcaaggagaagatggcccagatgagcagcctggtagaaaagaaagatcgggagctgaaggcccttgaggaggcactcaggttgggtgggcgggggccgggttggggggatggtttgcctgccgtggggagccgctgagtattgcagagagagggctcagtacatgctgcttgaggagttgaatgaatgaatgatatgtgtttcatggcttggcttattctgtgcttctcaaacttccttgtccaatattccagatgacaggtctctgcttaaatgccacttcctccaggaagccctccctcactcaccctcaccaagcatagccaagggatcctgctgtgcttgggctccctcagcccctgcactctgtctaacctaccacttagcacacagcaaggctacctttgcctgttttgttgttgttgttgtttgtttgtttttttgagacagaatctcactcactctgttgcccaggctggagtgcagtggaacgatcttggctcactgcaacctctgcctcccgggttcaagccattctcttgcctcagcctctggagtcgctgggactacaggcatgagccaccaggcctggctaatttttttgtatttttagtagagatggagattaaccatgttggccaggctggtctcgaactcctgacctcaagtgactcacccacctcggcctcccaaagtgctgggattacaggcatgagccaccgcgcccggccccattgcctgtttattgtctgccctccccacgaggacagggtctgtgtagaccttgcccactattgatttcccagcccagcacataagggaacttaatatttatttaacaaatgaataaactggaggtgtcagcttaaaatacatacaaaatattgtcattgtcccatgggttcatctttaaaaatccccgtgagttgcatttttaccctcagcttatccatattttagaatgagtcctgttttcacaaaaaaaagagtttgactgaaattgatgttttgtggctatctggtagctttgtgtgcctcgtggccaaagcagattcacatagtggctaaaggagcagactccagacctggctgcctggtttcaaagccagaccctagaccaggcccagtggctcacgcctgtaatcccagcactttgggaggctgaggcaggtgaatcacccgaggtcaggagtttgagactagcctggccaacatatagtgaaaccctgtctctactaaaaatacaaaattagccagatgtggtggtgcatgcctgtcccagctatctgggaggctgaggcaggagaattgcttgaacctgggaggcggaggttgcagtgagccaagatcacaccattgcactccagcctgggtggaagaacaagaacaaaactccatctaaaaaaaaaaatagccagaccatccacttacaagaaaggtgactgcaggcagattgctgtgtgtctctttacttgtctgtaaaatgagacaagcagagtacctaacttgtgggattgttatgagagatagaagggttagccacacataaagtgttagaaacagcagacatgcagtgaatgtccctgtaaagccacagcaggtgtcttcagcccccgtgcaggaaccaagggcaggtgttccctgccctggccactctcccataagtcccctgaaactgaattctctagaaatatgggaacaggaaacaagtctcaaaagaattctgtttcctataaaaatagagctccatgtcctggtcttccaatgagtgtaaaagtaatttgtggtttccagaacctcgtgccatcctcctcttctctaccctagggcttcccaagagaaacacagactccagctgaacacagagaaggaacagaagccccggaagaagacccagacgtgtgacacctctgtgcagatagaacccgtccacactgaggccttctccagcagccaagaggtgagtgccacccactcctgggtactggaaggatgtgcaaagacacagcccagtggtggctgtctttccttttgaagacactttcattctaagttccaaaagtatggcttgctggtgtgaaatgtataaagtaaatcgcagaatactgcctctttagtcacagtcaccagaggtcacagctgtccacggtgtgatgtgcatgccatgagatctttccctcggagaggcctccacgttctcacatggtcaagaaaatgcagtgactgaagatcaggtgtggattcgttccacctgtgttcgaatcccaactcctccacttagaaactctgtgaccttggggaggtcactgtacaccagttccctgttctgacagtaatgaccacccccaccttatgggttggttgagaaatacattttatgtatatacacacctgaacaaacacacacaaacccatacatatatttatttattcattcattcatttattttgaggaaaggtctcactctgtcacccaggcaggaatgtagtggtgcaatcacaacttcactgcagcctcaacttcccaaggttcaaatgatcctcctgcctcagcctccctagtagctgggactacagacgcacaccaccacacctgacgaatttttgtatttttagtacagatgaggtttcaccatgttacccaggcttgtcttgaattcccggactcaagagatcctcctgcctcagcctcccaaagtgctgagattacaagtgtgagccaccacgcctggcccatatagatatttgtttagtagataatttttttgctaatggtatcaaaccatgtacattctgcaacatgggtttatttttacataacagtatttaatgggcatatttgcaagtatatgaagatctgccttacccttttaaatggttgtgtagaattccactgtgtttcttttttccaaccagtcccctcttgatggacacttaggttatttctcctcttgtgcaatgctgtcgttaatgtacttgttcttcctgaattgtgcttgatggggccaaactgccttcccgaagagccacgtagtgagtgccccatggctgtgtcttggtagctgttccatgcacctgcccagaagcatctgatgggagtgtgtctttgagtgaaaacagccttcattgggccgccctggaagcaggtgctcacactctgtccctatgactggggctgtgatactcccgatgatccgcagcatgcaatggtgagactcagtggttcctcaaggccctggtttcctggagcctggggctattctttccccagggctttttgagcctagagagcatggcgttccagtaatgggctttggattttcaccgggaagccaggccaaatgtgtcagcttgctttccggctctctcagagatgcctttcccctgccagacagcattgagccagggccgcaaacagcttgaacgaaagggctcgaggtccagccagctgtccttggcatcgattgctgtccagagcactttaacagaattgtctcctggttgctcagggcaaccaggaaggcaggggctgcagcaggtccacgtggccgtaagctccgtggggcagggggtgtgtggcactcctgttggaatcccaggctcttacagcagaacctgacccatattcattcactccttcaacaactattgagcacctgctgtgtgtcaggccctatgccagggataggagaagacgcacagggtcccgcccacaccaaacgcccttggactctgtgcacgtctgttggactggattgttgaactgggatgcccttgatttttagtttatattatgtggaaggattagtggaggaggacgggggagggagactgcaagataaaagggaaaatgtatttgttccttcttggaatggttttcctccttcgggctccttcctgctttctaagccagagtgggtcagagggcttaagagttgtatgagaaagaatctcatcctctccaaataaataaattcccagcagatccgcaaggaggggtcacatggagctcctggtacccctcaggccaagcacaggctgtgacggagccttaatgcatggctacccctgtgcccccaaaactcagtatctgctgccccctgctatacacagagagacagagagcaagggagaacgttccaggttgtttactgccggggcaaacacgcatcctcaagaggtgaccaaggccagtgtagagccagcgctggaagggaaccagccacgcatcctgtgagcaggctgaagacagggtccaaggacaagcgaggccgtactaagcgcaggcagggtgggctgcctccctctcaccgctgctgagccctggtcccagctggaaagccagggcaagctccttacagctcctgtttctgacaggctctgtatttattgagtacctactgtgctcagacacagtgctgggccctgggaatagcacagtcttcaaaggagataaagactgctctcacggagcctgtcatctgggaggagagacacagaaataaacaagccaagatcaagtaaaatgtccagtgggaataagcgctctgaggaactgcacagcaggattcagcacagtgacgcgggggcatgggggtggtcaggtgatcaggtggtcagggaggcctgtgctggaggagacctggagcagagccagaaggaaggaagggaacgagtggtggggacatgggggtgggggtaggggaccgtcccaggagggcctcagacggcactgttgaaccccttgtaggaggccacgggccctgttcccctggtggcagtgtggctagcacagggccggggatgtgtcatacaggcctctgataagcatttgaaccatcaaaggaggaagaacaaacagatgtctcctttgctctcctctgcgttcttttcccggagcacttatcattctccagaatcagagtatttgtgcgcctgtctgtctgttacctgtctgccccatagaaaatgcacccacagcagcaagggctggtctgcctgctccctgatctcaccccagtgcctagaacagtgtccggcatgcagccactgctaccattcaatagatagatggataggcaacttctaaaataattttggttcacttcatactacatatatattatcttccatatctatagctatctatatatgtatatgtatatgcatgaaatgaaccaaaactggtattttaaaaagtattataaaagagccagattgtcagtttcttctctttcttgccaatttgactgaagccttccctggcaactctatctacaaatgaaaacggttcccaacatcccaccctgtttccccacttaattttctctttaccatttataacttctaccagatattttcaccttgttgtctgtctgcccacatgaggatgcaaaatctatgacaacagggatgttgctgggtttagcaactactcaatccccagagcctagaataagccttggcacatagaggtgctcaataaatcgatgtgagatgaatgaatgaatttcttaccctagagaagcattgtttagctcagagtttatgaatggacttcaggaggtcttgaccctctggacgttgtatgcaaatatttgtgtcgatgtgaatttttctggaggaaaaaaccctgcatgcttccaaatcttaaaagggtacatgacccttaaaagatgaaaaagacggctgggcacagtggctcacacctgtaatcccagcactttgggaggccgagggaggcggatcacgaggtcaggagttcgagaccagcctggccaacgtggtgaaaccccgtctctaccaacaacacacaaaaaattagctgagcgtggtggcatgcacctgtaatcccagctactcaggaggctgaggcaggagaatcgcttgaacccgggaggtggaggttgcagtgagccaagatcacgccactgcactgtagcctgggcgacagagcaagactccgtcaaaaaaaaaaaatggtgaaaaaggcctttctttgtctgtgctcttagtaaacccaactctaggctggttacagtagctcatgcctgtaatcccagcaccttgggaggcggaagcaggaggattgcttgagctcaggagtttgagaccagcgtgggcaacaaagcgacatcctgtctctacaaaaaaatagagaaaaattagtcgggcgtggtggcacacacttgtagttccagctgcagagctggaaggatcgcttgagcgcagaggtagaggctacagtgagccgtgatcatgccattgcattccaacctgggcaacagagcaagacccaacagagcaagatccaaaaaccaaaacaaacaacaaaaacacacacgcacaaaaaaaacccaactctaacctgagctatttaggatggtccatctgggtctagtggccaccatattggacagtgcaggtataaaacattcccttcaccacagaaagttccgtggggttccagaagctccgaagcctcagaggaaggttttcatttctccagcccaaccaagagccaatctatcaaatccccctagcaaatattaaataatcatccttatcaccagttaaaagaaagcatcatgggttctcatctgaaaatgcccctccgggagtagaattggctgtgattgttcagaaacaagaccagcatgacagcgaatggaaacctaggcatagaacagtattagaagaaaaaataaaacgtggagagggaacgtggaggggcttttatttatagtaatgctaaataagaaagttggaagtcttcctacatgtgacccgatatttgagatgaaaaatgtaaattctatctctgctgaagccctaatgctatttttccaaaggtgctaagtgactgggttcctctatacatgaattgttcacatttctgtgaatgtaagagaaatcttctaatccctgatcaaatgctgcccgccccattctgcccacagcagcaatccttcagcgatctaggggtcaggtgcaaagggtcccggcacgaggaggtcattcagcgtcagaaaaaggccttatctgaacttcgagcgcgaattaaagaactcgagaaggcgcgctcaccaggtaagtctcctccttcctagtcagagcagtggaccccagactccggctcactttggggactgaccagtttgccaggactaccatgttttatctgcatcatcccagaacttggaggacattgtaatacacaaaaagatgggcagaccatgatctcagagtcaagtgcaggccttgatattaaataaataggatttcatgcataactcactattgtacgtttttttttttgtttgttttttttttttgagacagagtctcgctctgtcacccagcctggagtgcagtggtgcattcttgcctcactgcaacctccgcctcccaggttctagtgattgtcctgcctcagcctccctagtatctaggactacaggaactagccaccacacctggccaatttttatattttagtagagacgggatttcaccatattggtcaggctggtcttgaactcctgaccttgtgatccacccgcctcagcctcccaaagtgctgagattacaggcgagagccaccacacccagcctactttttcttatttcatggtggctgggtgagaactttgtcatggatgaatactgtctaaggatcaatgttggagaaccacttacagtaccccctttagagggggtagaactcccctaagacttggggcccactgcaggctggggcactggtctaggacctggaagcctgggttcaagttccgtcttggttccatggctgaaggaccttagcaaagtccaccctcaatggtctcggcgctgatacctgtgtggctgcagcctcctatgagccgggtgaccttggccaggtcatttaatctctctaggactgtgtcctcatctgccacgggaggtcgtaaggattaaaacaggcctgtgtaagtgtcctgtaaatagttgctatggttattacatgaaacaacttcttcctgagcctttcttttgagtctactttatttcttttacagatcataaagaccaccagaatgaatcatttctagatttaaagaacctcagaatggaaaacaatgtccagaaaatactactggatgcaaaaccggatttgccaactctctcaagaatagagatcctagcggtaaccaaagaaaattctctctgctgtgactggcatgtggagaggaggggcctgagggcagacactagcttcgttccctggcacagccatacatgtcagtggtttggggctggctgctgtctatactcactagctggggccccgaccatacccgttgtccagggtttgcacagaaaggtagccttccacttgcccacagtatggttccgcatggtgttgacattgggccacgttaatcgctgaagcatggcgggccccctttccagatcatgtatgatattctttattttattttttatttttatttatttttattttatttatttatttatttatttatttatttatttttttatttatttttttatttattttttgagacagagtctcgctctgtcacccaggctggagtgcagtggcactatcttggctcactgcaagctccgcctcccaagttcatgccattctcctgcctcagcctcctgagcagctgggactacaggcacccgccaccacacccggctaatttttttgtatttttagtagagacagggtttcaccttgttagccaggatggtcttgatctcctgacctcatgatccgcccgcctcggcctcccaaagtgctgggatgacaggcgtgagccactgtgcccggccgatcacgggtgatattctgcagaacatgttcagcaggctaatagatcatgttatgccatgagtttgcctaaagtttgcttttcgctgttacctgaaaaacacaaccacataaaaggcaggagaagggatccgtgattcagagcacacaagttcctagagtcagagggacctgtgtccagatccgagctctgcgagctgtgtgaccttgggcaaggctcttgacctttctgggactccatttcccagctgtaaaatgatgacaaaaatactgaaggagataattctggaaagcgcttagcctagtgcctggctcagaggaaaaacttaataaatgatagatgttattattaaaattatttaaataggccaggtgtggtggctcacgcccatcatcccaccactttgtgaggccaagagaagggtatcgcttgaggtcaggagcttgagaccagcctgggaaacatagcgagaccccatctctacaaaaaaattaaaaataacgctagtcaggcatggagccaggtacctgcagtcctggctagtcaggaggctgacatgggaagatcacttgagctcaggagtttgaggctacagtgagctatgatcgtgccactgctctccagcagggacaacaggatttccagaagtgatttgattgtgcagttgaaggtgcctttttaccctaaatggatgtttgggcatttgatggacacgtgacaggtcagcatctgtcacaggacccgccgagggcacgtgtgctgccgcagctggatccacaccacacaggcttctagaagaaataatgaggctatcctacattctcttggcagtttttctggacatttgccagagtccaggaagagggtctttggaaatgagctggttttctagagaaaatcaaaccctacttccctgagggtgggagtggagggacagcctccaggttgagatcagtttgattcccagcctgacccgctcccaagacaggccttccccttggcagtgctccagtcccaccacagactgacccgctcccaagacgggccttcccctccacagggcctcagtgccaccacagacaccatgcagcaggaaacctctccactctctcagaagtcctcaatcttccgacacaacactggcagcaattcaaattaagataaaggggccaagcacagtggctcatgcctgtaatcccagcactttgggaggccaaggcgggcagatcactttgagctcaggagttcgagaccagcctgggcaacatggcgagaccctgtctctacaaaaaattagccaggcattggtggctcatgcctgtagtcccagctactcaggaggctgaggctagagaatcacttgagcccaggaagtggaggctgcagtgagccaagatcacatgattgcactctggcctgggtgacagaatgagactttgtctcaaaaaaaaaaagaaaagaaaaatgaagagaaggagcaggaggaagaacagctggcatttactgagtgcttactgtgtaccaggcattgagcagagcccttcacatgtgttatttcatttaatccacacagcagcctgggtcagttaccattgttatccccgttttacagataagaaatatgaagacttcaggccaggcacggtggctcacgcctgtaatcccaacactttgggaggccgaggcaggcagatcacttgaggctagaagtttgagaccagcctggccaacatggcaataccccgtctctgctaaaaatacaaaacttagccaggcatggtggtgcacatccgtgctcaggcacgagaatcacttgaacccgggaggcagaggttgcagtgaaccaacatcgcaccactgcactccagcctgggcgaaagagtgaaactccgtcaaaaaaaaaagaaaagaagagaaaggaaaagaaaaattaaggcttcagaaggtcaagcacttcacccaaggtcacaaagataatgaatgacagagccaggactgtgtccctggaggtccgcctcttgcagcctgctggtctgcagagaaggagatggggatggtgtgatcgaacctgcagcctggactcttccttaggtcaccctccctccggactcctgcaagctgcaggaaaagagaggggattctgaaggggagtgcagaggatgcagttgagggagctggagacaccaagctgcgttttaggttctttttgtagcaaaactgcccaatttattgtcatctttaaatacctgctttattctcatctcatagatagataaatgtgtccactcttaatatagacaaatatgtcacacttacctatcacagtcaccttcaggcttttagatttttgtgaatgggttttttgtttttatttttgttttttttaatctcccaggtttacagtatagagccggtaaatgctgcaagctgacatgctcttggtgttcgtggcgagcacttaaaacccaatttagttgtgaggggatgtatgggggttgtccgtggcctccagactccccgcttggcctggtggcttttctatgcctttggctggggctttcagcaagcagccggctgagcagggtcttagcaggtgcacagctgtctcctctctggaaagggtctgaagtgaaggggtgggttgccctccacacctgtgggtgtttctcgtaaggtggaacgagagacttggaaaagaaaaagacacagagacaaagtatagagaaagaaataagggggcccggggaaccagcgttcagcatatggaggatcccgccagcctctgagttcccttagtatttattgatcattcgtgggtgtttctccgagagggggatgtgtcagggtcacaagacaattgtggggagagggtcagcagacaaacacgtgagcaaaggtctttgcatcatagacaaggtaaaggattaagtgctgtgcttttagatatgcatacacacaaacatctcaatgctttacaaagcagtattgctgcctgcatgtcccatctccagccctaaggcggtttttccctatctcagtagatggaacgtacaatcgggttttataccgagacattccattgcccagggacgggcaggagacagatgccttcctgttgtctcaactgcaagaggcatgccttcctcttatactaatcctcctcagcacagaccctttacgggtgtctggctgggggacggtcaggtctttcccttcccacgaggccatatttcagactttcacatggggagaaaccttggacaatacctggctttcctaggcagaggtccatgcggcttccgcagtgtttgtgtccctgggtacttgagattagggagtggtgatgactcttaaggagcatgctgccttcaagcatctgtttaacaaagcacatcttgcacaacccttaatccatttaaccctgagtttgacacagcacatgtttcagagagcacggggttgggggtaaggtcacagaatctcaaggcagaagaatttgtcttagtacagaacgaaatggagtctcccatgtctacttctttctacacagacacagtaacaatctgatctctcttgcttttccccacactgaagtgatgctcacccaccatctgcatcatctctggaaagggtcggaagtgagcgtccagtttccgctgcgtgaaaatggcattcctttaataaaaggaggggggatgttttctatttaacctgcattcattcatttgacaaacatgcccactctgtgccaggtgccatgctgggcacaaggagggggagagtgagcaaacagcaacaccatccctgcttctatggcactctcctctggaccagtgtttccaggccttagcactgttgatattttagggccccacaatctggcgtggtttgtgggggcatgtgtggatgtctagtagcgtctttgctctctaccccctagatgctagtagcactccccgcctgcagttgtgacaatcaaaaatgtgtccaaacactgccaaatggcccaggggaggggacaaaaccaccccaattgagaaccactgttctagagggaagacaggcggtgatcaaagaacaagacaagtgatgtataattacagagacttcaaagacagagtcattctctgaagggtgggaatacaattataagaaagcagttgacaaaggaatcagacggaatgatcaggacgcggactgaaaatcaactctcttgagttaatcttcggtaatcacacagtgctttagcttccagtcatagaaagtcataatggaatgtcaagagaggcctttcatttctttctgatttcagcctcagaatggcctttgcaacgcaaggttcggctcagccatggagaagtcagggaagatggatgtggctgaggctttagagctcagtgaaaagctggtatgtacatccagcatccaccctgctcctatccaaagcctggggcccctgcagtcagtgttgaacgcaggatagtttaaatatcaacctcacatgcctatttagttactctaataactctgcaggacctacctactatcccagcatgggtcaggaatcacatagccaaattccttgaaaaactgggtggttagaatgaagtgtttatatctgttgtcatttttcacccccggttctcaaaaaaggcatagcgtaaatggatgtgggagaaaggaaagtcatgctgaaagccccagttgcacatcctttcaaagcatgtgcgtgttctctgcaattgcagaaagtgaatgaaacagaattagacattggcctccttaaagcggccaccagcggccgcgggtaatgcctcttatgcgcgaacgttttccttgtagtacctggatatgagcaaaaccctcggaagtctcatgaacatcaagaatatgtcaggccacgtgtccatgaaatacctctcccgccaggagagggagaaggtcaaccagcttcgacaaagggacctcgacctggtgtttgataagatcacccaactcaagaaccagctggggaggaaagaggagctgttgagaggatatgaaaaggacgttgaacagctcaggtacctcggcacccccatgtccccacagaaaggcccgggcctcccttctcctggctaaactcaggctagcagcagacctctaggcctgggacaggaggacagagacccacgtgtggaatacctgcaatgtcagaaggggaccagggagggcactgactaggcctggtagagggaattctgtccccgagatcacggctgcagaagtgcacggtttccccattctgtgaactattttctgtgcaagctgcacctcttgcgacccttgacttatggtttcccagttgtgtagcattgacagctccgtcatattttcaagagtcgcagttccccactccccaggaagtcaggaggggctggtagcacatcctttatcccctcccgctacacacattcggctgatgaatggctcgttctgctctctgtaccccaaatcttcgtcatgctctcctgcttgtgatgacactcctgagtgagcccccactgtggatgtattttgagagacttccgggtctggcacattgatgatgattgggaaagataagggaaaaacagacgccatctctcctgtgcacccaggcggagcaaagtgtccattgagatgtaccagtcgcaggtggcaaagctggaggatgatatctacaaagaggccgaagagaaggccctgctgaaggaggccctggagcgcatggagcaccagctgtgccaggagaagaggatcaacagggccatccggcagcagaaggtgaggcgctgctgcccagggcagaacctcccaggctgccctgcagctcccattagcaatggccgagggtggtccctggaggatccaggtagcacagaacacagggatggatgcaaagggaggcaactggatagcttttgcatcagacagacctagatttagaccagagctcaaccacttgctatgtgaccttagataggtttcttaacctctctgagactcatggtgctcatctgtattttttttaatggtggttgttattcatatttatatcaatctgccaggtgctagggatacataagctctcagagagtggagatttggattcactattctgagtgcctggcacgcggtagacacccagtaaatatttggtgaacggatgggtggaaggacagacaggttgatggacagatggaagaatagatggactgaggagtatacaggtggatgggcagatggatgtccttgaagaacatatcccttagtgtggaacagagagctgacttcaggtggatttcatagctgaaggctgtcgaggctgtgcagtccaggaagggcactcagcctggttagaacatgcagcgagggcctgccaaagccacaatgccgccagtgaccgcaaaggagagctggagtttgtccaccaaagggatgagagggtggacattcccggctgaaggagccgcagaggaaaggtgtgaggatgagatttgctccctggcacagagttggaaataacactggcttgagaaaccgagattccagtctcaggctggtgacccagcgaaaatgggtccccctcccaccacacacacacacgcgcacgcgcacacactctggtatctcatctgtagcatggtacaggagtcagccggtcctgggctcaaatccccgcacttattaactgtgcgaccttgtgcagatctctttgcctctctgagccttgctttcctcattagtagatgggagcttccagcccctgcctcgcagacagatggtgaggatgaaagaatgcaggcatccctcgctatctgctgtccactctcgctgtcgtcatacctcaggagccaagtgcttttggatggtgagggtgcttgtcccgtctctgaagcacctgcccagggcctggcaccagccggcggacactgccttccccatgctgcccatgacccatgctgcccgtgacccatgcaggtggtctcctgggtgagtcctgcctcagacccggtagggtctacacactggaaagtttccccaaagcaagtcacacatgagcagcacccgggcggcttccaaagctccctgaaagctggcagaggggctttcctgtctgctttgcagttgacatattcatcatccactcctgcagtccacaaggcactggaacagtgacctctaaatagagccagactctccctttccttcactcttgcctaaggtggagcagatcccaaggctggggttaggcaagtcagggaaagaaccacagtcactgtttcttcatgaccgtctccaggccagggactgggctcacctgagctttgcagccgtgatagggcttattaatgcctctaatagccctgcctggtacgatgatccctattttacagatgaggaaactgcgcctcagagagttaagaggcgcccaagtgcacacagcggctggtaaggacagctgggacctgaccccagatccctctgaccctggttctcctgctgtctgcagggttggccgtgagtcccctccttgtaactgtcagcttttatgtgtgtgtgcattctcgtgtgtgtgtacattctcatgtgtgtgtgtgtgtgcacatgtgtaccatgtgcatgagggtttggctgtgtgtgacactatgtgtgtgtgtttgtgtgtgttgcctgcctgagctcagagagagccaaacccccagagaagggtgccccctccaccaaccaggtgagctccttgcagaggcctggccttcatcccacaaaccttgcagaccacaggctccctggcttgcagcccccaaaaatgaaggcagcgctctgctctggacgtggcctttccagcactcaccactctgaattaaacatcacaggcccccatctgcacatgtcgtggggctgcctcgggcagaggaccgtttccttttacgctgtgccatgccagggagatctgggcagcagcagagtcctgagatgtcctttgatgtacccacaggagagttcgctccttcccgaggcagtgtcccccagggcttggcaggccaggcccacagcagagacaccaaaccacagaatgggacggcagagggccctaaaaagcccattgtcatgcactggctgaaaatgaaagaaaacctgcagatttacataatcagtccacatgcattattcatggcctccctaggcacacacaatgcgggctggccagccttccaccgagcgggaggaggaaggtccgaagcggccaagccaaacctgtgtcagcgtccccagctggagctgggaactttcaaattcatggaattcacaacgtagggaaagatttgataggaagtagagccacgatcacagcaaggctgatggtattatgtaaggagcacttgctgtcagatgcaccccacagggcacggcccaccctcacctcacatcagcctgcgaggagggctgccgggcatctgcccgctgagaggggaaactgaggaggtcggagggcagtgtcaccgggctactcagctacagaaacgggacctcagcgacctccgatcccggccctcccagcccatccactcatcccccctattcctttccaggatgcaccccgcctactccatcaccatttctctcggggttcatccccaggctcagtttgcatttaaggtttgtgactaacatgtcatcagaaactcctgtttgtcaagggaaaaagggggaaaatctttttttttttttttgcttgctgttcaagaatttgacaacatcagagaaaacagttttttttcagtggtgcaagactcgaaagggaacctgtatacatctgtttaggcagcagctgctccctaggagaggaaagtagaattcctttaagtttcacacctaacattttcacaaagagtcgatttttttccacgtctcctgtataaaatctcagtgccccttcataaagatggaacagttgaggctctgggaaacgaaattactcaccttgagtttcagaactatccgcccctgacacacagacaaccactgtagttttaacacttgaacatctcttcacggagcagaacttcccagagtccaaagtcatacttccagctgggcagggtagctcacgtctgtaatatcagaactttgggaggctgatgcaggaggatcacttgagaccagcctgggcaacatagcaagacaccacctctaaaaataaaaataaacaaattagccaggtatggcaccacacacctgtaatctcagctacttgggaggctaaggcaggaggatcaattgagcctagtagtttggggctgcagtaagctatgatcgcaccactgccctccagcctgggcaacacagcaagaccttgtctcttttaaaacagaaaaaaaggcatagttctatactaatacctctggctgtgcaaatcagacctgacataaaatgttggggaaaacctcagtgctggtcattcacagagaacctcgtggtcatcagcctcctgactctgggatgccctgggtccacagctccctgcagtgacagtgtgacagtgacaatggcccaggctgtgcccaatctagtccacttcccacatcactaaacaaggcagcagagtttctccgagataagaggcagacttggagtccaacagatagggcttagggttcaagcccacctctgtccctgagtgagcctcagtaggtgactttacctctgtcgcaggtttctcaacaacagcaccaataacggtaacaacaggacctgcttcgtggggtggttaaatggtgtgatgccagcagagcctgtcacagagcaagctcagttactcggttactgtggggaagagaaaaggccactcgggggcgggggcagtgcctgcatcgctttcaatgagcttcctgcccgctggcgagtcctgcagactccgagactttttcccgggtcctcctagagccggcagcgcctttgtaaagctgtcttttctctttagtgaatacagctagggctacagccaagaaacagctgacacttttcgtgaatgggctaagactgggattttcagtaggaacattttaaatgcacagaagttgcccttggagaaggatgcaagcccgttcttcggcctttgttaggacttgagtgtgagaaccactgaaatgcactagctgcttctggtggggagcaggccagctccccttccgggctccagccaatcaaatcctccccaaggggcttggccacagctttgccacgcggtctcagctgggctggagcccctaaccttgcctctgcattatgagctcaagttcctcatctttaagatgaaaatgaaaatgtgcctaacccacaggagtcaatcccgtgaaggcatgcatataaaacccttagcgaacacaacctctcaatcgtgctcttttctctttttctttttttttcctttctttctttttttttttgtttgtttgtttatttgtttgagacagagtttcgctctgttgcccaggctggagtgccgtggcacaatctcggctcactgcaacctctgcctcccaggctcaaatgatcctcccacctcagccttccaagtagctgggattacaaggcacccaccaccacgcccggcttatttttgtattttttttagtagagagtaatctttgtattttttagtagagagttttaccatgttgcccaggctgatctggaactcctgggctcaagtgatctgcccatcttggcctcccaaagtgctgggattataggcatgagccaccacactcagccatcatatcagtactgttttatacatcatcatatcagtagtattttatttaactcattatttcccaagattttcttgggcccaggtattttcaagatcctggtttcctcagcaccactatgtgtttttgaccaaaaagtagaaattggtagatgtgtgggatgagaatgggatgggggtttgggggtggtaaccacgcgccctcaccagaatggaaaagtaaaatgtggctagagtggtgcagtgtatggatagaagatggctcaagaaaaagacaccaggctgggtgcggtggctcacgcctgtaatcctaacactttgggaggccgaggcagaaggatgacttgaggccaggagtttgagaccagcctgggcaacatagcacgacccccatctctacaaaaaacaaaaaaattagctgggtgtggtgactcacacctgtaatcccagcactttgggagggtgatgtaggaggatggcttgagcccatgagttggtgaccagcctggcaatatggcaaaaacccgtctctactaaaaattaaaaaaattagctgggtgtggtggcacacgcccgtagtcgcagctacttgggaggctgaggtgggaggaccgcttgagcctgagaggtcgaggctacagtgagccatcgtcgtgccactgcactccagcctgtgtgacagagtgagatcctgtctcgaataaaaaagaaaaagactctcccgcagtgatcccttatcttctgcccacctatctcagtgagtcccagcgtctcctagaaacctcagaggcctgtcccagattggaacgggtaaggacacactaaggttagcactctcttgctaacctgatacttttcactcaggaaagtgtagaggagcacgaactgagaaacgcaaaagaatcgacaccttgcaactgtgccttcaaagagaaagacaggcaggtatgggaggtgttctgatgttgcagacacagagtagagacagtctcaactgggggtaagagctcatggcatgcaaatgcctgcacgcgctgcccaaggagcactgcacacctccctccttcccttccctccccagcctctgcccctcgtccctccctccctccttcccttccctccccaggccctgccccacctccctccctcccctccccaggccctgccccacctgcctgcagtttgaacggatgacctaagagacaagcacgcgtccagccccgtctgtccattaaggtgagaaggcagaggggatattccagcacagcttcagctcatggagcagccatcctaggccactaagtaacttggggacttggaggcaaggtcctaagagaagaaagaagggaggagtgaggagcttcaggaatccctgtcctaagaatgaaatgaggggggtgaaagaaggtgggagtggctacaaaacagagccaggaatgaggatgaaagtgcctcgcataagcacttctacccccgccaaggggagccctgttttactccgaccttcctggcagccaacgagaaatgggaaaccaacttggtcacagttcacagtgtccatgagatacaatggatggatgctcgtaagtgctcttagaacaaagaccttgctggactttccccctagaggggacggtgtgtgacgtaaagagcagcatctttaagaacagccttcgtggggtgacatgggctgagccgtggctgagaacagctcttgagacagatcgatgtcatcacatcccactgaatccagtaaagttcagtaaagcagatctgtacggggctgggctctgctctccagtgctcaggtgtccactgagcagacttaatccagggatggattgtggagcagtgttccacctgggattcctggagcccttgtgccccgtggaagggtatgagtcccaacatcctcacatcttgtttccaccagagcagatgttttacataccaagttcctcaaaggattttgtgtgggtaaagaatcctactggtacgcctgtaatcccagaatttggggaggccaagacagccggatggcttcaacccaggagttcaagaccagcctgggcaacatggcaaaaccctggctctacaaaagcacaaaaaattagccagccatggtggcgtgcacctgtagtcccagctactcaggaggctgaggtgggacaatctcttgagcccaggacttcaaggttgcgatgagccacataagcatcccgctaaactctagcctgagcaacagaggaagaacctgtctcaaaaaaaaaaaaaaaaaaaaacctgctggaagagaaaggagggaagagaggtttaaaaccattgcttgacaatacctgaaatgatggctctctgctgaatttgttcctctcactaactttgtgataaatgtttagtggctgcaggctccaggccttctagagggcaactgtcagctaaatacaggccacgattcttcgcagactgttgctttgggagaacagtggagacttacgagcacctatgcccctatcctaaaagacagcctgactcactgtccccgtgggtctggggaatgccaaatggggttgccagatttaaaggaaaaaaataaaacaagatacccagttacatttgaatttcagataaataacaaatagtgatttagtgttaagtatgttccaaatattgcatgggacatagttatacttaaaacaaagtatttgttttcattctgaaattcaaatgtaactgggtatcctgtattttatctggcaacccaccagcaatccactgagcaccagctagatgccaggcagggcggccctgaggcagacgtcacaaaatagcagcccacggctatgcctcatttggtccatttcagaataaggtgcttttggcagggcatggtggctcacgcctgtaattccagcactttgggaggacgaggcaggctgatcacttgaggtcaggagttccagaccagcctggccaacatggtgaaacctcatcgctactaaaaatacaaaaattagccgggtgtggtggcaggcgcctgtaatccaagctatcgggaggctgaggcaggagaattgcttgaacctgggaggcaaaggttgcagtgagccgagatcgcaccactgcactccagcctgggtgacagagtaagactctgtctcaaaaaaaaaaaaaaaaaaaaaaaggcactttaagagaatactccagatttctggcttctttgggaaacttggatctgctggtgacactaggcccacagtcccacacgccaccagcttccagccccttagaaaggaccccggcccctgggtttgctgccatctccatctcaccgccttctttgacttcctggcccctgtaggcatgaggttggtgacccccatggaaggttggggatctctgagaggggggcccagctccctccctccctgaggtgtccccagtatctggggctgctctttcttcagggaactgttgctgaggtgccacatcttggggaccccagggtcagcaactgtaaaccaaaccccagggaaatagcaagcttcagattctgggtgacgatgacattcaaacaggcccctaaagggagttcaaccatcatgggccccaccatccctgagccattgggataccgaggtgtgaaccaccgggcatctgcagccccttccacttgctctgggaggcgctgcctcgagctaaaacagacgtgtcctccgagaagagcattgttcctcacaggccctgggttgagcagcctccacctctgctggaatctagaacagagacccccaagagactcagcaagatggggcactgtggctcccaaaagctgtgcccccttctcgttgagaaaatggatttttctcaattttcagatgctacctgtttggaatgctgtccctgggaaggcccagcgttccaaatggttagcatctaaaagtggagaaaaatccatttttctttgatgcaaaaggcaaagaggaatctaagctagattttgttcttattctttctgtattgaagagacgagtatttgtagagatggtgaagaacaggatgcagaactcaaattcccaggtgagcagaaagagcatcctttagaattctctttttttgttgttttgttttgttttgttttgttttgcttgagacggaatctcactctgttgcccaggctggagtgcagtggctagttctgtggtttcactgtgttagccaggatagtctcgatcttctgaccttgtaatctgcctgcctcggcctcccaaagcactgggattacaggagtgagccaccgcgcctggctgaacactcttttttaatcaagtctataaaatcttaaacatgttgaatcattgccattcacaaatcagccctggaactggaattgatccaatccacactcctgctttgcagaaagtagaggcaagctatcaggaagcttgaaagcaaaacacatttttgttgaataagaaaggcttatttaacaagtttgataaaaggccacagttattctgagacaacaaaattgtcattggaaaaactgaagatattctatgcaagggacatttttggaaaatagaagcctcttcttaactgacaccattgtcctaggacagaaggtggctgctgctgctctgggtgttaggagggtagagagtgtccccagggtccccctagacctgagacttttgccacctgcaaagtgggaatgaaggggaggcctgttgcttactcatccacacacttggagagactggagcaggcagacactgccctgctgccagttattggctgagaatgacatggagatgtaaaatgacagtgttgacattgggatgggccctggatgtagggatattgtggtgctcttagatgtgaagctccctggaatttcaggcttaacagaatgggggcagatggtgcttcgcctaagaacagagtgatcttcccatttatccagccctccagccacagcttgagaaaaaaaatccatttttctctgatgcaagaggcaaagggattgatggcttggacctccttggtgcaaaaaggtttcctccaggccaggcgtggtggctcacgcctgtaatcccagcactttgggaggccaaggcgggcggatcacgaggtcaggagatcgagaccatcctggctaacacggtgaaaccccgtctttactaaaaatacaaaaaattagctgggcatggtggcgggcgcctgtagtcccagctactcgggaggctgagacaggagaatggtgtgaacctgggaggcggagcttgcagtgagccgagattgcgccactgcactccagcctggggacacagcgagactccgtctcgaaaaaaaaaaaagtttcctccaggttccttgaaatacatagcttggggtctccgtcctctatagtgtgcttcgagtccttaaggtgatggagtcatcatgaccaccctgaggaagatgcgacgtggaaaatctactctttcaggcttgcttgctcataaaaaaagtgtccatccctaacaagcttcagaactggatttgtgcctttcttttcaaggccctacgggtttttgttttctgtcctccaaaataccattcactgatttttttttccattttggccaacagtcttttgttcgtgggctatatgctataaaggaaaatcttccagttaacaagtacttactgaggacctaggctaggccacctaccgtgctaagcactggggagagaagggcgaacaaaaagagagactgccctggccctcattcgcacaacagatattaagagtcagcaacgtggcagggctgtccaggtgttaaggttggatgatgcatcctcagtgggggcagcatcacccccgagggggcaaaaattcattccttttttttttttttttttttgagacagagtcttgctctattgcccaggctagagtgcagtggtgcaatttcggctcactgcaacctccacctcccaggttcaagcgattctcctgcctcagcctcccgagtagctgggactacaggtatgcaccaccacgcccagctaacttttgtatttttagtagagacggggtttcactatattggcctgggtagtctggaactcctgacctcaggtccacccttccaaggtggagggattacaggcatgagccaccgcgcctggccaaaaattcattctttctatgtataaagcaatagccatatctacatagatgtggacacacacacacacgcacacacacacacacacacacacactgctatctgtaaaagggtgaggggctggggaaaaaacctctaagaattctcagggggcgaggttgatagtgaaagaaaggctgagaaacacagagttagactaatgaagacataaagatccctgcctgcctgcctggcttacagtcttgggcttttttttttttggagaccgtgtcttgctctgtggtccaggctgtagtgcagtggcaccatctcagttcactgcaacctccacttcccaggctcaagtgatcctcccacctcagcctcccaaagtgctgggattttagacatgagccactgcccctggcctctttttttttttttaagtaaatacacataatgattaaataataactttgagcccagtgtttggaggacaaaggcccctgaactgagctgagcatatttcacagggacgtcttcactcccagtccaagctccaggagaggccttcctgaggaccgtatatttaaacttagacctgaggttgtgtgggagtgggcagggggcttcctagagccgaggcttgcagtttcctgaagcagacaccccaggatggcctgagttcattcacacctgggtgtggctatttaaatgaccggcttctacccctgccttttcattctaagggtgaggcacgtggttccaaatatctcaagtggaatctgtgcatttcacattccccattcccaggtcagcggtcctggctgccttctgctgccccatcctttgtcatttcataaagagaacaaagccccttccgtggtgcttcccatcccatgcttctggcagccctggggctggagacctggggacctgggactctttaacaaactccctggctccaactctgacagccaactccacaccggctcagggcactggcatttggaaaccatccacagtcagcaattttattgaaaatcaaatgaaaaggaatataaagtaagggttgtttaggggggaaggcttttgagtttgctgtctgttttctttttccctgcgcatttggaccaatatttactttgtgggctggtatgggactgacttaccctttcttgccctgaaacaatcttgaatgcagagtctcaaaacacgtttgaggctcctgtcagccactgtcacaggcctcaggaggtgatttttaaatccatcttaaggtgaaaagagcttaagtgatggtcctaacagactcttccattgaaatcttcccagaatctcctctgtgccctctgaggaaggcaggatcgatattcatccctatttggcagatgaggaaactgagggtcatgtagtgagtggcagagctgaaacgcgactagccacccagccctcttgccccaggtgtatgtgcagcctgaaggctgggggcaaagctttgcaggaacagagttggcaaggtaaatcctgttggaaagaaacttgcaagccacagtattatccacagtgtgtccagaattgtttgcgagagagatcttgggttgcagttaacaaaaatctactcagaaaaggggcagggcggggggcttttataaagatacagaaatgaatgcctcataaaacctatgggaaaggctgggtgcggtggctcacgcctgtaatcccagcactttgggaggccgagatgggcggatcatgaggtcaggagtttgagaccatcctggctaacatggtgaaaccccatctctacaaaaaatacaaaaaaattagccgggcatgctggcgggcacctgttgtcccaggtactcgggaggctgaggcaggagaatggcgtgaacccgggaggcggaggtgagcagagatcacgccactgcagtccagcctgggcgacagagcaagactccatctcaaaaaaaaaaaaaaaaagctacgggagagaactaggaggatagcccaggcatcgtctctctcgtgcatgcatgcactcgggcacacacacgtctccatgtcatttctgcccctctccatacctctgctgatttcttctctctccagtggtatgacaagaagggacagcctcacagtcccccagttcaaagggccagcccagggagcgagtggcatctcacagcccattaccccgactcctaggagtgggcatcggaaaagcccagctgtgccaagtgtccaacaaatatggcccgggagtggggtcatgcacacggctgccaggacgccccctcctttgagctgggaagtgctcaaggggttaaacagacccccttaaatatacttcactttctccttctaagccaagcttgtccaacccgcagcccaggacagctttaaatgcagcccaacacaaattcgtaaactttcttaaaacattatgggataattttttttttagctcatcagctaccattagtgttaatgtattttacgtgtggcccaagactattcttcttccagtgtggcccagggaagccaaaagtttggacacccagttctaagccatcagagactttagacacattcaagtcagtaacagcctttcaggagaaacaccatcacaatgaatgtgttactgtaagaacctcctggtttcaaactaaaaaatatgtaaagggaccaggcttggtggctcacacctgtaatcccagcactttgggaggccaaggagagcagatcacttgagcccaggaactcgagaccagcctgggcaacatggcaaaacctcatctctacaaaaagtaaaataaaataaaataattagttgggcatagtggtgcacacctatagtcccagcttactcgggaggctgaggttggaggatcacctgagcctgaggaggtcgaggctgcagtgagcggggattgctccacagcactccagcctgggcaacagagtgagaccccatatcaagaaaaaaaaaaagaaaaaatagagaaaaggaaagcaatatctgtatacctggaagggtgcaccccaaaacctcactaaagctcatctttgagtaacgtgataatgatgaatcattttatctcttttgtgctcatatctgtgtgtgtatatatatattttttacaacaaatattttattttgtgtacaaaaaaataacaaaaccagccgggtgtggtggcttatgcctgtaatcctagcaccgtgggaggccaaggcaggcagatcacttgaggtcaggagttccagaccaacttgaccaacatggtgaaacccccatctctactaaaaatacaaaaattagccgggtgtggcggcatgtgcctgtagtcccagctgcttgggaggctgaggcaggagaatcacttgaatccgtgaggtcgaggttgcagtgagcagagatcatgccactgcactccagcctgggccacagaacaagactctgtctcaaaaaataataataataagtaaataaataagtacaatacaataaaatacatgggaagtgtctagttctcctcatgttaaaaataattaaataaggctgggtgcggtggctcaagcctgtaatctcagcactttgggaggccaagacgggcggatcacgaggtcaggagatcaagaccatcctggctaacacggtgaaaccccgtctctactaaaaaaaaaaaaaaaaaaaaattagctgggcgtggtggcgggcgcctgtagtcccagctactcgggaggctgaggcaggagaatggcatgaacccaggaggcggagcttgcagtgagccgagatcacaccactgcactccagcctgggcgatagagcgagactccgtctcaaaaaaaaaaaattaaataaaataaaaaataacaaaaccacttgagtggaacaattggagtcttgctgcaatggagtttgtgtgttttttctcttgcttgttaaaggttggaaccagaaaagcctccctaaagatggaccaagaaagagagatgctgaggaaagagacctccagcaagtccagccagagccttttgcattctaagcccagtggaaagtactagagaaacctcgtcccaccaggcctcatgtgatcctctgtgagttcatgtgactcttctgtgtcatctgtgtcaaaatactgagttgcttttgtaagtctttaaagattgttaccctagtgtttcatttcctagaccagtattttgaacaatattatattttggagactgtggggagaagggttcttctttaaaaatacctatgaatgtacacgaactcaggtatatgaagaatagaagtgtgtaacccagatgtccaggcctggtagatataattatgtggtccacgttgggtcatgatgttcccaaatatcaaacctcctaagacttccaacagactcacacttgagaaaacctaagacttgtactggagcctcagggcagaattgtaaccttggagctctcagggccttgggatagtgaattcaagtctccgttatggcctggcaggatggctcatgcctgtaatctcagcactttgggaggccgaggcaggcggattataagatcaggagtttgagaccagcctggcaaacatagtgaatacctgtctctactaaaaatacaaaaattagccaggtgtggtggcacatgcctgtagtcccagctacacaggaggctgaggtgggagaatcacttgaacctaggaggcagaggttgcagtgagccaagaccacgccattgcacgccagcctaacagagtgagactctgtctttaaaaaaaaaaaaaaatggctgggcctgtaatcccagctactcgggaggctgagacaggagaatcacttcaacccgggaggtgatgattgcagggagccaagatcacacaactgcactctagcctgagtgacagagcaagactccatctcaaaaaaaaaaaaaaaaaatctgtttattgtaataaatttagaacaccaatcagttttattgcttccataataatgactaacgtctgtatagcactctacaattttcaaaacacatctcatttaatcctccccctgcccctgggaggtaaatagtattagattccccatttgacagatgaggaagccaaggccctgagaacttacatggcctgcctaaaatcacacagctagtcaactcaagagttgagtcttgaacccaggtttctaattccatctcatactgtccattcggatacaccagatggcctagttgttacagtcccaggccacaaggacagaccaagtccccagtcaccaaagagcacacactgcctaggtacacacactcctgttccacggtgtttggagagacccccattttccttgctgcactctctgctccttccaagttctgccttctctccatctatccgtgccctcactgccattcttgtgtggccaggcagccaaaaaaaaaaaaaatggaagagccagaaatcatgaatacttttttttttttttgagacagagtttcactctggtcgcccaggctggagtgcaatggcgcgatctctgctcactgcaacctccgcctcccaggttcaagccattcttcagcctcagcctcctaagtagctgggattacaggcacctgccaccatacccggctaattttttgtatttttagtagagatggggtttcaccatgttggccagactggtctagaactcctgacctcaggtgatccacccaccttggcgtcccaaagtgatgggattacaggcatgagctaccgcggccagcctactttttttatttttaaaaagccacaataaaattttttttatattttaaaaccaaatatattctttaaacccattaaacctgggggaagtaggacaaactctttgtgtgatattccattggaggcacatcttacacatggttaggacctaaagccagtgagaggccaggcatggtggctcacatctgtaatcctaacactttgagaggctgaggcaggaggattgcttgagcctaggagttccagatcagcctggacaacacagtgagaccctgtctctacaagaaacttaaaaattagctggcatggtggtgtgtgccagtagtcaccactatttgggaggctgtgctgggaggatcgcttgagcccaggaggttgaggctgcagtgagctatgactgtaccactgcattccagcctgggcaacagagcaacaccttgtctcaaaaaaaaaataaagtcagtaagaaaggagagtgtaacttgactttacaaatacactagaaaatctcagaaatgttcaaaaacctaataaagaacctggtattagactgtaccatatccccaaatatagagctgagaatcttgatgcagttccagggctaaagcagacatttccccacttgtgttcagggaaacaaagccagtcttcagaaaaaaggaggctggaataaatatgcaacaaggagagataaaaaacccacagaggcagtgcagcagatactgcagctgctcagcagatactaagtctacttagtcattgctcagccatcactttcctctaccatataggctcaaagctaatcaccatgattttcccgcctcccttgcagctaggacgggccatgttggaccaatctggctaatgacatataaggaaaagctcctgtggagggcttcccttccagcttctctaggtgaaagcattcacccttggtacctttgtcttgtctcctttctcactcctggagctcagaccagaagctggagcagccaccttggggatcagcagacaccagcagcaggccaaaggatagtggagtggagggacaagaaggcctgggtgagccttctctgagaatcactgagctctgaaccatgaatgaactgcctacctctgtacttcctgttgtataggacaaagaaatccctatctatttaaa

SEQ ID NO: 2 - DNA, 26402 bp, Homo sapiens
cggacgatgccgtgacgcggcacggcgacactgttggcaatatgagcgcacccctgtagagggagcccttcggtcctggaggcggcgcggcgtgaagacaggttgctatttgagagcgttcccttgaagcccctcagagagtgggggaggggcggcggacggcaagcggttcctgtctgcgcttgcgccggcgcctctgccgacccggcctgcacgcacgcgcatgcccgtagcgcgcggagccgcggtggccggcagcactgcgcgtgcgcggtgaggagcccgctaaggagcggcgctggcggacgtcgggctggctgcccgtgacgtcgtgcggagagctttaaagtgcgggccgggccgggcgtccgagggtctggtcgggagtcgggccgcgtctccgcagcagccctccgcggcatgaggcgctgccggcgcccctgccccgcgggacgtggagaaggtggaggaggaagaagccccgttgtcgccaccgttgcatgacccgccgctcctgaggccctaccccacgcccggaccctcgacgccccccgccgggtcccccactcacgcatgggggttcggcgctaaggacccccctccctccgggggccccggggcgcgtccccttagagccatgcccggctgccccgcccgccccggaggaccctagagcagcgtcgtgggggccatggcggccgccagcggctacacggacctgcgtgagaagctcaagtccatgacgtcccgggacaactataaggcgggcagccgggaggccgccgccgctgccgcagccgccgtagccgccgcagccgcagccgccgctgccgccgaaccttaccctgtgtccggggccaagcgcaagtatcaggaggactcggaccccgagcgcagcgactatgaggagcagcagctgcagaaggaggaggaggcgcgcaaggtgaagagcggcatccgccagatgcgcctcttcagccaggacgagtgcgccaagatcgaggcccgcattgacgaggtggtgtcccgcgctgagaagggcctgtacaacgagcacacggtggaccgggccccactgcgcaacaagtacttcttcggcgaaggctacacttacggcgcccagctgcagaagcgcgggcccggccaggagcgcctctacccgccgggcgacgtggacgagatccccgagtgggtgcaccagctggtgatccaaaagctggtggagcaccgcgtcatccccgagggcttcgtcaacagcgccgtcatcaacgactaccagcccggcggctgcatcgtgtctcacgtggaccccatccacatcttcgagcgccccatcgtgtccgtgtccttctttagcgactctgcgctgtgcttcggctgcaagttccagttcaagcctattcgggtgtcggaaccagtgctttccctgccggtgcgcaggggaagcgtgactgtgctcaggtaacccacccgggtggagggggcggccctgcgcctgctgccttagctacccaccctggcccagaaagcagcagcccgtaggagtctgcgttttttacagttctgaccagttcttctgtttgtagattgtagggagcgagagaagggttttgtgtttaagatacctatagcaagaaaatagggaaccgatgtggaaatcctgtccccgaaggcaggtttgacgggatcactgacttggctgagaattcatcgaaagccatcttttcagaaggctgttccctttgatttttttttttcccaccatccatttcttagcataagtccctttgtgattttccggttttccattctggccttccatttacaaatctatgctttaaaattttttttttttttaatttatctaaaagtctttcttgttctgccatttttggattccttaacagagaaagtagtcacaggcaaaggccccagagattatttaattgaagcacattctccattcccaggagggggagtgacttccctggagttgaacagattagtggttgggccaggcatacagagcagcacactcttaaaattcttccctcctggctgcagaagagcccatcagttctttgtaagaacgtgttacttgtagtcaggactgaatacaacagaatacagctggtctcttgactgtttggccttacagttgcgtgagcagcagaacttaggcttttggcctatattcggttcccagatcctgctgagaattagctcagtgccctggcccccagaggagattgccattgggaacacctttgctgtttatgtgaagtgaaaatttatttggaagcggcctccttccagtcctgaaaaaggtaaacctagtaatgtaattcagtaatacccaaaacatcttaggtttagaccgcagctgttctcagagcagcttggttgaccaccaccaaatacaaggttgaggacacactgggcttttgtcgtgagcagcccaggttctgaagtgagtcagtagggccaaagtcatgaggagaagcagggtccctggagccttcttgatatgagattaggtcatctgtttcatttgagtctaacagctgaggctgcttccatgttggggatggcagcagagccttgtaatgtccaagacgtcctggtgggaaggtgggaagtcagtagtagcagaagcgatactttagctctttaggcatctgaaacttagaggacagcctagctgtcagatgccttcttataatgggcttctgagcttctcagatcttcatggcgctcctagatggatgtcttggcaaaatgctttaagatgggatttccaggacacaccctctccgggtgcttgctgtgtaaggcaggttggggtctgaccccattgacgggttctcagtgcaaaaattacctcacacaaggaccatttggtctcttagcgggatattaattttctgcgtagtcattggccctcagggtggttgtcaggaggtctagtagtggtctggtgcttaatgaggggatcacaaggcatttttttttggttttgggactactactctccttaacacatgcccaccctgtattttaagaacagaagtttcgagttcttagtatgcaggtctgttagtgatcagcaacaggattgcatcatcaggaaaattctcttcatcttttcctcagaatagtaaagtcctaaagctttcccagtccctgtcaaccctttctggattcagacttggctgtggtgttagtgtgggaggctcagccatgtcctgaaaagtgctgccccaggctttgaatccagcttttctctcatttgctttgggatcttgtaggcgttctctgagctggctttcccatctgtaagtggggatgatgccaacttccaaagcctattagaattaaatgtggtgatttgttgtctaagatagggcctggcacagggtaggtacttaaatgggtgcttgctttcatatacaaccactcagtgatcccctgctctctcactggggaaggaactagggatttggtggagcctgaaacatgacagtttcccttcgtgtagttcaagccccatggaggcctcagacaggaggataagttatagcccaggaaggtaactgcagaagcacactgaagggggacatcttttccactttggagtgttggaagtttaggggaggaaatgaactggaatgtgaaaagtgactaggaatgagccaagcagagaaaggtggagaaatacacaacagcagtgtctttggctgcagtagcaggagtagccataggtaagagggggtggatgttgatgggaggcagatggagttcattagtagagactgtggttgagggtgctctggtgaactctagatcagggcttctcaacagtgctattgttattcagggcttgataatgcttcattgttgaggctgttcgtgcattgtagactgttcagcagcattcctggcttctatctgctaggtgccaatagtgttttttatgacaaccagaaagtgtccagacactgccaaatgccgaggcaggggaagtgcagaatccttagttgagagtcactgctctagggtctggacccttccactaattaaatcttcttgcacctgcatacttagcttaccttggtatgcaggtgggtgaacacctgcctattagtagtgcccgtcgtcaaatcctgcatataaactggtaagaagtggtgctttctcttttcctggtacagatcctagcccagaggtgatgagcagtaaagctgcagattggaagggaggggctggtgaaaacagtggtgcggtgcagatggggagggattctagtagtaggcatcttagacttcagttggtgttggtggcaatggtatctgtacccctctaagaccgcatggcaagaatacaattttatatttaatagtgatcagcatggatgttggtgcgtcacaaacattgactcagcagtgtctaaacctgggcatttagaacaaggcctcacagaatcttctggaagtgcttcaaactcctttccaaacctagtcgtcagttgttttttgtaaccttcccatgttaggcctgggtggatcccctcttaaggctgtactttagggaaatattttttatcttcatatcactttatctgtcattcattctcctattccctgttggctgcatggggcagattaaaacagactctgattggactaattagaataattacttcaaggctaattgcttacttgctgctatctttaatcactgctacgtggtctgtggtgtggtggccacatgcccagagacccaggcctaggccagccgtctggaaatgactgtatcacccaggcacggggcatgcactggtgagctcagcctgtgactcttccagttaacggttggtattgggtggagtgggcacccctgtcagttctgggatagtctgatcttgttcagctggttgaaagcaaaatttagctttctggcttaaaatagttgggaaagtagggcagataggtcctgggccacatctcttgtgtggactcttctgattccactggagggggaggaaccacaggatgaagtcagggctgtgcaccgtcaggaggagctctgggccaggggggttggctgcccttgctgctgccagagcctgacaaggcagagggcagtaaaagaaaggaagctaacagtgaaccatggtgttaatcatgaagctcagagcaagcagagaataaataggccataaaaatttcagagctggccaggcttagtggctcatgcctgtaatgccagaactttgggtggccaaggtggacggatcatgaggtcaggagtttgagaccaacctggccaacatggtaaaaccccatctctactaaaaatacaaaaactagccgggcatggtagtgtgcacctctaatcccagctactcaggaggctgaggcaggagaatcacttgaacccgggaggcggaggttgcaatgagccgagatcgagcccttgcgctccagcctgtgctgtagagtgagactccgtctcaaaaaaaataataaaaaaaaaaatttcaaggccgggcgcggtggctcacgcctgtaatcccagcactttgggaggccgaggtgggtggatcacgaggtcaggacatcgagaccatcctggctagcatggtgaaaccctgtctctactaaaaatacaaaaaacaaaattagctgggtgtggtggcgggcgcctgtagtcccagctacttgggatgctgaggcggcagaatggcacgaacccgggaggcggagcttgcagtgaaccgagatcatgccactgaactccagcctggcagcctgggcgacagagcaagactccgtctcaaaaaaaagaaaaagaaaattcagagctggctggccagttggtggatagccttcactgatacagtgctagctctctgggggatataggttcatctctgcaaatctctttcatggggctagtgggtgtacgtgtgccctttggtgaggccagcaaggccccctggacaggcttgctaccaggaaacacagatgggcttttcttcctaccgcctccacaacaaaatccagaaagtttgacagcagacttggttggagttacagcaccaccattttaactcgttgacttcggggaaattaagctttttgaggcctcagttttcctcatctgcaaaaccagtctaatgatgctatagagttgttatagaaagttgaatctttgtcatctattgaatgcttgaaatttagctaaaagtgtctcaggagatgggctaccttctgtgtttagtactgtctatcttggtgtgtacagaattgggacttggcaggttgaccttccctctggattcagaaagccccaggacttcttataaagttaggccatgggtcgtcttggaggcttgggtctggtaaataattgagcctgagctcacaatcctgcccctgggtccaggtggctggtctgctgcccccaaaagcctgaccttcttggtcctgtgggtctgtcagtaaggcaggtagccatagctggagagagacagtcaccaggctgggatcttggacagtccctccatctctggttcatcctggcctaggcagggcatggagtagatggaaaatggtggccatcttggaaatgtgtcataacaactcagtttccaagaccgtcccctagaggagagatgtacagtcctgcatagtttctttaaagaatttttcagggccaggtgcggtggctcatgcctgtaatcccagcactttgggaggccagggcgggtggatcacctgaggtcaggaattcaagacaagaatggccaagatggtgaaagcccgtctctactaaaaatacaaaaattagccgggcgtggtggcaggcacctgtaatcccagctactcgggaggctgaggcagagaattgcttgaacccaggagctagaggttgcagtgagccaagattgcgccactgcattccagcctaggcaacagagtgggactctgtttccgaaaaaaaaaaaaaaaaaaaaaatttcagacacctcatttaatttgcacctaatcttctgaggaggggcttgctgtgatctttgttttgcagaggcagaaacaggttctaagtggtagaatagttcagctcaacacacatttcatttagtgtccactgtgcagggatgagtaaggcctttgaagagctttgtcttgaagggaagacacaatttccacaaggccagatggaatagcaaagaggcatgagagggtgtggttgagcaatgtagggggaacccagcctgggcagtcagggaaaggcccccaaaagaggagatagacatgtcagctccttcgagagtcactctgaggtataggactagtgggtgacatttgcaacatatactggtcagtgcctctggggctggggctgggggctcagcccagagagggagcaggcaagccagatggcataaggttatttcctcttctcctttccctgtgaaaacaaaaaagcaggaggtcctggaacttttcatgccagcagtagggctggacccaagggcatattaagttgcaagctggccgactgagactttcagacaatttattttgtagcaagtaggttccttaatagtaaataataccctgtggtctctgctcgacattttgtgagattggccaggagagcttcccttaatcaggactttgagctcatgttgccagagcagccggatattctgaggaaagggtcagtgggctgtgtcatagctgctaggaagttctagaagaccagtactaataagccttccaggttgggtcagtgccaaagtcatttttgtgggcctgtgcagccctacctccatactagttcttccaaggcctgggctccgtggcaggaacctgacatggcttattgtttgttctagagccctttgggggatggggtcagggagcatgcgggcagtcaagctttgacaaacatctggatttgctccagaactgcattaagaaaagtggttccttgttggagatgggaagtcagggcccttggttatgcatatagccaagtcaaacagattgataacacttgtcaatggcagggaaggttgcctgtagccagcactgcagattcaggacttagaaacgtgcctctggggccgagcatggtggctcacacttgtaatcccagcactttgggaggccgaggtgggtggatcacgtgtgatcaggagatcgagaccagcctggccaacatggggaaacagtcttcactaaacatacaaaaattagcctgtagtcccagttacttgggggtctgaggcaggagaattgcttgaacctgggacgtggaggttacagtgagccaagatcatgccactgcactccagcctgggcaacagagtgagactctgtctttaaaaaaaaaaaaaagtgcctttgagacctttgacagctctttgggaaagtattgtgtgtctatatgggacagtcttgcagtctagacccccattcccccagtgtggaatgataaaagcatgggatgagaactagagttcctagctctggaaatggggcccaggcggcccccactactggcagatccctgcagggggagcccagaccatgtctctttggcagatgctgaatccagggctctggcttgccccaggatagtccagggccctctgacttttgtcagagtgcttagtaaagattgtagggtgtcaggcaccctgcattatctgacttaattctcgcaatacccctgcaggtaggcctctcaccacccctttccaggagtgtcaaccaagtagtcatataatgctgtttttctgcctggaagggaggaggccccgtttttaaaatcttgtaatcttaaaaactttaatcttgtaatctttaaaactgtccccatttttaaaatcttgtaatattagtagcagcaaaagaatagctaaattataaagcataacaaaatgaatacccaagaacctactgttctccttattacagatgaagaaactgtacaggtttttaggttcagcatgtgatttaacaaaggtcacaaagctagtaggagacaaagctcacatttgaacccaggtctcttcaactcactaactcctgtgtggtacttctcactgtgggctgatgggtattaataggtattatgagagaaggttctttggtaagtgctcaaagtcagtgggttcttttgctgtagtaattctcatgtgctttaaatatattaatgctttttgaaactctaatcagtattttacaaattgatttcactgtagacattcgtccactgtctttttctttttttttttttttttttttttgagacggagtctcactctgtcacccaggctggagtgcagtggcactatctcggctcacggcaacctccacctcccaggttcagcgattctcctgcctcagcctctgcgatagctggaattacaggcacctgccatcatgcctggcttatttttgtatttttgtagagacggggtttcaccatgtcggccagactggttacgaactcctaacctcaggcaacatgcccaccttggcctcccaaagtgctgggtgggattacaggcgtgagccaccgtgcctagcctgtctactgtctcttatgggactggtgttcatggagaaaattttgaaaaattcttgtctaggagcagcttgagggagaaggtggatctataaaataaaggtttgggccgggcgcggtggctcacacctgtaatcccagcactttgggaggccgaggctggcggatcacgaggtcaggagttcaagaccatcctgaccaacatagtgaaaccccatctctactgaaaataacaaaaattagacaggcgtggtggggtgcgcctgtagtcccagctacttgggaggctgaggcaggagaatcgcttgaacccggtaggcagaggttgcagtgagccgagattgtgccactgcactccaacctgggtgacagagtgagactgtctcaaaaaaaaaaaaaattaaataaaataaaggtttgttctatccccagcatgagctcaaatcagatttccaaatcagaggtgcttccttaaggctgagcctgaagcagtctggctttttatctcttgttggctcttgcatccagttattagagctgaggtttggccagcctggccatcttgaggggtccttcccaggcctgcagtgtttttaatagttaagtttgtgtctgtacaactagcctttgagaagggagctgatcagcagccatgagagaagggtttgtggtacagggccaggtagggaaactaagccatacttgtcctactaggcttgtggctgagtttctgggtgtgtagaactgctgcagctcagtagagtaacttggagtgggagtatcttgtggctgccatgcttccagtgatagcatgtgaggggtataggaagctcagagcttgcttccagagtttcaaattggaatgacgctagctgagaagaggacagtcatctacccacattagttggtctctgagcggttttaaaagtcatgtaacttgttgaaaataaacagatatctgagtatgatggaaatcctttttttttgggcggggggcagggggtgggggtcagtggtggggacagagtctcgctctgttgcccaggtgcagtgggcgtgatcttggctcactgcaacttctgcctcctaggttcaagcgattctcctgcctcagcctcccaagtagctgggattacaggcgcccaccaccatgcctggctaatttttgtatttttagtagagatggggtttcgccatgttggccaggctggtctcgaactcctgatttcaggtgatccgcccacctcggcctcccaaagtgctaggattacaggcatgagccatcacgcccagccggaaattcttaaaatattcaaacacaactgtcttcaaaattttggatccccccaaatggagacttcatgtagatattctattttggaatgaggcagtcctagctctccctggtgactcagtgctatcagtggctgccttggctttctctacctgctaaatggagggagaatgaggaggagctacagtgtactctctggagtacccttttaaaaaagggttcctggcctgttcagggagagtcttgcttccagcctctgccttaagtggccaaggggtctcctttgtgtcataccaggtttttccttgagtattacagtctcttggcaaaagcatcctggaacttaatatgatattcccttccatgtagatccttgaaactctcaagtaatgggtagagagcagccgtaagacctaggccatgttcctgtcctgttatatcccccaggaactttggttgtctgtctactcttcatggtcacatgttctgtgtttcttttcagtggatatgctgctgatgaaatcactcactgcatacggcctcaggacatcaaggagcgccgagcagtcatcatcctcaggaagtaagtgccttgatgtctgaccttctgcctcacctgcaggcctgtctggagatgtagctctgggtccacttagaactcagctcctatgtatcagtggcatggcagagtggagagcagaactgttaagttctctttttatttgaatcctgtgaggataaagttgttttgttgttttatcagaaaattaagtactctatttagggagtttaggactgagcaaaagcatatacgcccaatatttgtgggtataatcttgagacaagatttgggcaacattcttccaaacctcaccccaccccttagcctctattcctcacctccttcgttcttatttgttacacgtactcttggtgattatttttagactgtgcctttagcagcctgctttaaaaatgcctgggttttcactgctggaaggaacagggagtgaagagaggagacaagggtgggaggttaggatgtagtattcggcagaatcatggcttgtggctcttctctggggagggaatcagggatgtgctacttaacatcaacaaacctggcttcaccagcatttatttctttcacggggtgagtggaagaagccatagcctcacagacattggatcaagacaagccttgccccactgtccacccatcttgctcaggctggaatgcagtggtgccatcatagctcactgcatcctcaaagtcctggactcaagctctcttcctgcttcagcctccccagtagctgggaatagaggcaagtgccaccatacctggttcacgcctaccttttgaatagagtcccagagaagataggtgattgcccagagtcatagaagtcagtgagcagagcaaaacaagcacgtaaacttaggcttgacccataaaacttgctgtctgtcgtcttcttccttccttccttttattaaactttattttttagaatagttttagatttacagacaattgtgatagtacagagttctcatgtactctgcatcccatttctcctatttgttaattttttattggtatgactaaagtccatactttatttagatttccttaggtttttcctaatgtcctttttctgtcccaagatcatcctacgttacatttagttgacatatcaactcagactcctcttagactcctcttggctgtaacagtttctcagactttgccttattcttttttttttttttttgagacagggtctcactctgtcgcctaggctggaataggcgggaatgcagtggcaccatctcggctcactgcaacctctgcgtcccaggttcaagtgatttcgtgtctcagcctcctgagtagctgggactataggcgtgtgccacaacacccagctaactttattttttcgtacagatggggtttcccccatgttggccaagctggtctctaacttccaacctcaagtggttcacctgccttggcctcccaaagtgctgggattacaggtgtgagccaccatgcccagcctgccttattcttgatgatattgactggttaggtattgtatagaaaatctctcaattagaatttgtctgatgtttttatggtaaagtgtatgccatttttactacataaccaagaatatatactatcaatgtaacttaacactattgatattgatcatctggccaatgcactgtcaggttttccactgtaaaattactgtttttccttgtccatactgtacccttaggaaggaagtcaccatgcatgcccacagttaaagagtgtgggagttagcaccatctccttgagggggagcatgcaggtgaattacttagaattcttctgcaggggggattggtctactctccttcatttattcaatcatttatttatataagtatattttttatgtaagtatggactcctaggaatttattttatgctcaaattcttccagctttggtcattgggaattttttctggtgcatcaactttagtcagtaaacaataactttggcatcctggtcctttgggcccataactccagaatattgtagtggtgaagtctctttggtatggctttgccactttgccaagtcaaaacttttagtctgttttaactatagtagatgggtatgatccatatctgtgggacagtcctatggtacaggcagagcagtgaacacgtgggagctccagaaacttgggtcaacttggtggggttggcagcctctcttttctagcctaagactgttcccagaatttgtcagaggaagggaagagtttttatctgccttgtactttatttttctgtgataaccagcataggcaagaactcggaaacaatggagtccagagtgtagcactcttccagcctctcctccagtcatttcttctcaggctgtacctggtacctccaactgcagccagggatgggtggcctgcccaggccaggaacctggagaggaacttctaatgttacatagaaccagagcagtaacttcccaagagttcctctcatcttcccataatagcttattttggggaaatcttagttggatgtgcaggtggtagtggccatagctggagtgtcagtcttccagctgctactcttttattgaatggtgactcccatacctggccgcccagtccaactgagtcagatgctcctcagcacagctaggagtctgcaccgttaatcagctccctgggaagcttttcagccagctaggtccctgccagtggcctgaccttgggaatggctgttactgggtgactgaagctcttctaccttctgacttcagtgggcccaggaaccattcacagactgggctggagtgcagaagcacagagctgtggtgtaaggggactggagaagagtgggaggatgtcccagcttccccaggtagctgagctggggaagtgcacagctgtggggaactctaaagtatctgcagctcctgttatggtttatggatttgtgcctgggctcttgtggcaatgtggcctccattgggcataccttctcatctaacatgttcatcctctgattcatatcccaactccccaaataaacctacatgataaccaactcctcagataacctagtcattcttcatcgttcagattgaccattttgacatgcagaaagcatcatataaaaagccctttagctttttagcatcacctaaagccctttcagcacacatgcagacacatacacacacccctgtttggactgtcacagctcatacgcttgccattgtgaattttcaaatctgcattctgtaggagtaaggagatccctgttcatctggggcctagcatgaggtgcagcccagaggaggcatcaactagtgtggagaacaattcaggccggtgaggagcagctccagagtagctacatgggtttgtcttgggaaaggacgggttgtgacaagtttaaaaaggggagcatcttggcccaggcattgcccggagataagtatgatgtggccttggaagatacctggctggtttgatgtcttctggtgaggttgtgttacagtgggtagaatctgggcattgagcctggccctgattatggtagaggagttagagccggtcctgccttctcataagttcagataaagattgcacaggctgctggtggagaccctgggagctctgtcaccagctcaggtcagtcagagctggaaaggtctttctaagggcctcacggaaggaaatgggtgggcagctgccaagtgctttctggttggacagaacgcagcttctgtgaacatgggtggtgccaagtcttcatgcacatgtgcccttgtttcttacggggaggctggaagtaaccttttaaaaaagtctccccagagtggaatcctcagactgtcccttggtgttataatgtttggggtcacaacttagccagtaaatggctgagtgacacctggaacctgggtcttgtggttcgttggtggtttgcacagtggagtaccccaagtcctgccctttcccccagtgtgtcgttgggatggatgctttgagttaggaaactggagctcagatatagaagggctttcttgcctctgctgtgcaagtagagagttgtgctgattggggagaatgttatgagtatgtagggggcactctacagagagtggggtgaggcagcagctacaggctagtcggctctttgaggtgcctcagcacccccaaacttccctgaatgttactgtctcccagccgaccgagggcaagctgccgcagcatgcaagtcttttctctgtaatcgttggtaaccctggaaggggaggctggacctaaccttactggaggtgtggttaaagttctaaattactagttagataaccaagaggctgacaaacttctggggtataataattcatctgtgaggggagtcttccagttttcccatgattccctagtgctcctgcactagtgcactctgtgcttctgctcctggtaggccttgctagctgccctgtgccaagcatccacatattaaccttgaaactagaaggtatgaactctgtttggaaaggggctcaggtaggaagtgagctgcctcaggtcattgctagttggaatggcctttgagcagggatttctgacttgagggaaacatcaagtatctactatgtacaaggcacttgaggtgggcaccgcaggaaatttagtgcccccttggtgcttcacatgtaataagtttgcactttgcctgccattccaacacaaagcagagtgaacactggtgtaaaagcacagggtattctctgggagccctgcaaaaaaaaccccaaaaacccaggccggtcgtggtggctcacacctgtaatccagcacttcaggagggcgaggcagttggatcacctgaggtcaggagttcaagactagcctgactaacgtgatgaaaattctaaaaatacaagaattagctgggcatagtggcaggtgtctgtgatcccagctactggggaggctgaggcaggacaactgcttgaacctgggaggcggaggttgcagtgagccgagattgtaccattgcactccagcctgggagacagagcgagactccatctcaaaaaaaaaaaaaaaattttttttttttttaaattacatccagctttgcgggaggaagggtaaaggtgagcttggtagatctggcccctgagctagaaattgctggccaggcagaaatggtaagctcaaaggctaggaggcagggaaatataggggacttctgtagatgaggaatgaaagagggaaggaggccttaggtcaacatttgattctcaagagatggcttatgggtcttcggggccttgagttggtgactagggcacccaatcccttggtttttaggaggccctcaggattgcactgtgagacttgtattcttgagattggtactctccagttaaccagataaagtggcacaaagcagtatatatagcccatttatttgcttttggtcaagtggaactcagctcagagtggtctgaagctgggaaatgcagctggagatccctttgccaagtggtaacctaagctggtgtgtgctaggctctgtgctagtacccggaatggggtttgtatgggttcctattctcttttgtcctttgggaaaaggcagacatttagcatctcaacaggaactggtcaaagaaggctttccagataagtgccacctgaaggtagtcaaggatgcttggaccttagccagcatagaatgaggctcaggggcaaagatagttcagtcagaagagatgctctttacagaggcttggagtccaggaactctgttctggaacacagaatagataaggagtggaggacttgatacaccggcctaagacagcaaaagcttcacgctgtgcagagaaatgttaagcgcgctggggagccgtggaggcatgtgagcagtggggtgagggatttgcatgtgagagattgtaggaagcgaagctcaatagcttacttggtcattagatccacagagttcgaggagtcaggagaccttccatgagagcagagcaatctgaatgtgaggctgagtggatggatgagcagtggaaggaagtggaggtctcattctggacctcgttcctcagcagtggggtgaggggtggctagctcttagtttctctgaccagggcttggtgttgctcctttctccatgatttgtgtctcctgtggttagatttagcttacatttgttccctggttcagtaagtctgtgtccacgtgcatacaccctgcccttttggcagcctgactgttctgatgtgtctgtggcctgcccaaggaatatgggtacaatgggatcaccaggaaggtgacaaacttgggcttctgccctggctctgccactcctctccaaatgcagtcttatctgcacctgtaaattgggcagttgtggttaaacttgtgaatgctaggtggtcttctaaactcttcctggctgggtgcggtggctcgcacttgtaatcccagcactttgggaagccgaggtgggcggattgcctgagcgcgggagtttgagaccaccctgggcaacatggtgaaaccccatctctactaaaatacaaaaaattagccgggcgtggtagcatgcatctgtagtcccagctacttgggagaatcgcttgagcatgggaggcagaggttgcagtgagccaagattgcaccactgcactccagcttgggctacagggtgagactccatcttagatagatagatagatagatagatagatagatagatagataggatagataagatagatagatagatagatagatagatagatagatagatagatgatagatagattgattgattgatttaaaaaaccaggtgtggtggcatatacctatagtccgagctactcgcgagcctgaggcaggaggattgcttgagcccaggaggtcaaggctgcagtgagctgtaatcccacccgtgcactccaggctgggtgatagaccttgtttcaaagaaagtaattaattggccgggtgcggtggttcacgcctgtaattccagcactttgggaggctgaggcgggcggatcgtgaggtcaggagatcgagaccatcctggctaacacggtgaaaccccgtctctactaaaaatacaaaaaaaatcagccgggcatggtggcaggcgcctgtcgttgcagctacttggaggctgaggcaggagaatggcatgaacccaggaggcggaggttgcagtgagccgagatcgcaccacagcaccccaacctgggcgacagagcgagactccgactcaaaacaaaaaacaaaaaacaaaaaaaaacagaagtctgatgttggcagggggctggtggaagatgggtggggagagtcccgtgaggggagtgggtactactgcaggagagccagcaaggtacagacctgagctttgtgggagtctgattctcaaaggtgctggagcttagaccttagctctagggacccaggttactaaataggcaagagggtgcttggacaggcccacaatactggtctctgcctcgctttgttggaaagccaagcttttagcacaaggatgcctggtaaaggtggtgccagacgttggagagtagttggtagctggctggggactgccctcgctccagagtcatcgtggcctgagtgcggtctggtttaccatcttcccagaaatggtggtgctgccacctgcatgcacagtgttctcttgcactgaggagggcccacctgcactttattttttaattaaaaaaaaaaaattagggccgggcacgatggctcacgcctgtaattccagcacttcgggaggctgaggcaggcggatcatgaggtcaagagatcaagaccatcctggccaacatggtgaaaccctgtccctactaaaaatacaaaaattagctgggcatggtggcgtgcacctgtagtcccagctactcatgaggctgaggcaggagaattgcctgaacctgggaggtggaggtgcagtgaaccaagatcgtgccactgcactccagcctggagacagagcaagattgtcttttaaaaaaaaaaaaaaaaaaaagagtttaaatagggacaaggtcttactttgttgcccaggttggtctgaaactcctggcttttaagtaatccttctaccttggcctcccaaagtgctgggattacaggtgtgagccactgtgcctggccccacctgtgctttagaggccatcacagagtagtaggtagtagctttgtgactcaagctagtgatttgctctgggatttagctttgctctccagtccctacagggagaataattcaccccagcagcttctctggaggacctaggataggatcaactccctcccttcccttcggttcacactttagtgctacagccatcctttgttgtgacctcccttgtccctgctttgtcctgacacggtaggtggccgctctgggtatcacggtcaacctcacatgcccgaggtcacatgcccgaggtgctttgctctgacctttgaatactgactcatctgtaaggcaggtcttcattcctgttgccacctgaggaggcctgggtccagaccttactgctagaactgagcctcctgaatccagatttgtgactctctgctaaaccctgaggacctggcctacgccatgagagttggttgccttttaacaggggcatgttctgaagttaagctactggtgggcactgggcttggagtcaagctctagcctggcatcctgcagcttggtgaatttttggaagtgtagggagggcaggagcttctccagctgttatgagatgtacttataacagtcccaggggatgtgtcaagagctctcatcttggtggctctgcttttctcctaccatccatcattcacccgaagaaacaactccagagtgcccccactagggcttcactggggcttttggggcacacaggggccttccttccctgaacatgggctccctggcacctatagagtcttagctttatgggtaccagaggagggactttcttcaatgaggcccttagagtcctttaagtcaagtataaaggctaacattttatttagtctgatttctgccacctggacctctcaacttgatgacacgaagcctggtaaagaaaaggtcattgggccaggcgtggtggctcacgcctttaatttcagcactttgggaagccaggacgggcagatcacctgaggtcgggagttcaagaccagcctgaccaacatggagaaaccccatctctactaaaaatacaaaagtagccaggcgttggggtgcatgcctgtaatcctagcaattcgggaggctgaggcagaagagttgcttgaacgcgggaggcggaggttgcagtgagccaagatcgtgccagtgcactccaccctggacaacaagagtaaaactctcttaaaaaaaaaaaaaaatagaaaaggtaattgggccaggtgtggtggctcaggcccataatcctagcagtttgggaggctgagatgggcagatcgcttgagccccagtgtttgagaccagtctggctaacatggtgaaatgctgtctctactgaaaatataaaaattagccgagtgtggcagcgggtacctataatctcagctgcttgggaggttgaggtgggaggatcgcttgaagttgcaatgagccaagatcccgccactgcactccagcctgggcgacagaaggagcccctgtctcaaaaaataataataaaaataaaaagctcatctggagccgggcttgatggctcatacctgtaatctcaacactttgggaggctgaggtgggaggatcacttagaagagttagagaccagcctaggcaaaatggtggtaccctgtctcgccaaaaaaaaaccattagccgggcatggtggcccagtcctagcttcttgggaggcttgggcaggaggatcccttaagcctaggagttcaaggctgcagtgagttatgatcataccactgccctccagactgggcgacagagcaaaacacgatctctctttaaaaaaaaaagaatggttctattctatttcacatactcatctctggtagttgcccagtaccacctctacccagagaatcccagccttgaaggaggcaacttgccttcgattccttagaccctcagcgcaaagaagccttagagctagtcacatttctttcttttgctcagatggggaaactgaggcccgaggagggatggtgactagcttggactctgaatggcagtgccaaaactagatcatcctcctgttgatgttaggttctgcatccatgagtctggaggagtccagagtggagtctgagactgaagagtcactcactgcagctgggccctactggcatccccctctgcaaggccaacccaaagggatggggatgcctgtcctacctgcctacccaccagtttgggcctgaggcatcagaacattggttcccagctggaaggaaggagatgcccctgctgcctttaggagagagatttcctacccacgttcagagtaactcttgcctgtcaggcttgaagtctcactttggctttaaactttcccccgtgacttgcaggatgcatgacttactgcctttctgatccttcccatctatgtacagtaggccagccagtggaatgtggagaggcagccatggggaatgggggaaactgaggaccagatgcagttgttaccaaggatgccaagcagcctagcccaaggcagttcttggatttccctcctgcttacttctccccagcatcctctagtatccttagagtcctgctctgactgcagcccctactccttcggaactaagttactactttgtgtctagcagaccctggaaaaggtgccttcagggtctctgctagctatgtcctatcgcttcccacccagtctattacatgggtccttctgccctttgctcccacctgcctgacttgccagccttctctgtaccacacaaggagcctgagggctttgaggttttccatgccagctcccttctgttctggcttcataaaggacttggatcactgccctgagttaccgctacccagcttctccatccccctcttcctcatctgtatttgtgtgccttccctttactaggcagtgtattccttgaaacctatggctacacctgctgcttggtggggactgtgccttcaaaagccctctggcctttaccttgtcagcatcctgaaatgagcagaaactgccagatgactgctcatggttgtggagtgggcctgggttccctaccctggctctgccactcagtctcagcatccctgtctgcacagtgagaagatagggtagctctggctctctttctctccagcccctctacaggcctggaccagggatccttcctgtgttgggacccaccagtggggccgttggtcctctggcaaatgaagtagatggccccagagaacctgtgggtccaagtggagtgaggtgaggctgcttggttcagctaagagcgagccctgggatcttgcccctagggtagcacagcctgtcattgggagtttccagacagaagtgttcccattccttactcctaaaggtggacttgaggagggtctttgaaagtcagctagaccaatctctagttgaacctcaaggagagtgaggtacagagcagagactgctggcttccaggtctagctggctcccacttggcctggccagagaattggtctgatggtgcccacaccttcaccggaggccctttggtgaccccatgcatgtttcctttgcaggacaagattagatgcaccccggttggaaacaaagtccctgagcagctccgtgttaccacccagctatgcttcagatcgcctgtcaggaaacaacagggaccctgctctgaaacccaagcggtcccaccgcaaggcagaccctgatgctgcccacaggtactcagtttaggaccctcagcaaaggctggcaaaggcctggctgcagggtgagaagggtggagaagcctggggtaggctgtttaggagccttggcttgctcaccctttcaaaaccttatgtctggttcctctgggttggtggcattggtgacattcccatctaaccctggccaactgcctgtacacccagagagaaggggtcaggcagagactgtaacagatggcaatatcatggctttcccatgactttccttgttcagtctcacccagacacccttgtggaattatacttagatgtcaggagggaatcttgggacttggataatagtgaaccagggacttatttcaaaaaggattggataaaaggtatttgaggagataattttttttaaaggaaaaaaaatgttttggccggcacagtggctcacgcctgtaatcccagcactttgggaggccaaggcaggcagatcacgaggtcaggtgatcgagaccatcctggctaagacggtgaaaccccgtctctactaaaaaatacaaaaaattagccaggcgtggtggcaggtacctgtagtcccagctcctcgggaggctgaggcaggagaatggcgtgaacctgggaggcggagctggcagtgacccgagatggcaccgctgcactccagcctgtgcgacagagcaagaatccgtctcaaaaaaaaaaaaaatattttttaagtgttggggaaggtttccaaggaggtaatgtttaagttgattccagaaggataaggaagacatggaagagcattctaggcaggaaatactgtatgagctaaaccctgagatacaaaagagctttgtggtttcagggggtaatggggttagtaagtggagaagggggtgttgggaggcccaagagagagaaagtgggtagagctgggaagtaaaggtagatggcagaaccatgcagagtcttgaggctgtggtagggaagacctctgtccagcagccctggcagtgtcccagggcaccagactccaagccaggcagaccccacagggtaattgggaaatgtcccaaagactgggatggtcactggcacttagtgggcaagaacctccgataccagggcctctgccaggactacccttcgttgaggaccactgagctgaagtgacccatcccaaggatgagacgaggtacagcggtaaagccaggcgcctcctgccagcctctcagataacgtcctacctccctttccttgcaggccacggatcctggagatggacaaggaagagaaccggcgctcggtgctgctgcccacacaccggcggaggggtagcttcagctctgagaactactggcgcaagtcatacgagtcctcagaggactgctctgaggcagcaggcagccctgcccgaaaggtgaagatgcggcggcactgagtctacccgccgccctcctgggaactctggctcatccttacgtagttgcccctccttttgttttgagggttttgtttttgttcattggggggtttttgttttttgttttttgttttttttgattctatatatttttccttggttttgttgcctgttagggctgaagaatagaattggccaggacctaggttctcatattcttggtattcctcctggatggaaaggctgttggcatcaataggggacagaggctgatgctggagtggccagtagaggtggtggagcagagcagccatcttttaagtggggctgtatcaggctgggtttatttaaaagcaacaaaatgttttggttaagaaaattattttgctttcagtgtaaatcttcgcagtgttctaaacaaagttcagtcttctgctcgcccctttccctcactgatgtctgcacttggttgaggtctcctggagcctcacaggctctgctgttctccacttctcacctgccatccacgccctgcaagctcatgcaaacaccctttcttcctcctgcggcagagttgttcaggttgcctgggcaggggcttaaacagtgccagcccctgccatcccaaagctattgttaagccccccaggcgtcctccacccacgcccactagcctgccatgtccacagttccttgggctgctgaggggctagtgcagtggtcctgacctctcttatcaagagcacacttctttgctggttgctccttttgagcatatgcgtgtgattatttggaacagttagacttgccacgttgggtcagttttagaaattgtttctagctagagggactggtgtccttccaagtctagcatttggggtatggaaaattgttgtggtgtgtggtagggtttttgttttcttttttgagttttttttccccctttagtctcctggctttttcctttcccttcccttctccactggccagcttgggcctcatcctcatgtcatccttctaggaaggcgcctgccccatcttgtctgccggcagcatgcatccaaggccagagctcaggcctgcagactgggctggtgcctcctccgcttcagggtatgggagttggtgaaggggctttcaaaaaataataaggaaaaaaaggtaaagtctttggtagcttctatccactcagatcctggaaggcagcaaggttttgtggatctagattcattaggaatgtcttcttgtcagccaggccaggacccgggcttgccaagagcagaggccctcccagcaaccaggataccaccactttgggggctttgtgtacagaggtccgggtctgagacctcataggctgcagaaatctggggcagccaccatcaagaagcccctctcaggggccagaactcctttgccagcgtggatttctcaagtcgggactgcataattaaagcagttgcagttttattttttttacagcttttttcccaaaaatgatttgtagttgtgtgtgcagcacttcgccctgatatgtgtgctctacaataaaaaccaaatctaatatattttgaaa

SEQ ID NO: 3 - DNA, 60506 bp, Homo sapiens
gctcgcgggggctgaggcgagaggacgccaagcgcccgccggggctccgcggggccgcgcaggagagcgcgcgtccgccgggtgctcgcgcggggttggtgaggttccgctgagggcggccggggctctgggagcgtggtaacgtggctgcaaccttagcgacatcaggaagaacagggtcgaggatcgaggtaacgggacgctcgtctcccctcagtcccctcgtctcccctcagtcccctcttcctttgtgcggtgccgtccgctcgcgccgagccctccctcaccccagcccccaagtcgcaacaccgtcccgtcttgggtctccggtgtgcggaggaaattcgagccctcgtgcaccaaccgaaactccacagctgagagggcttggggcccggacagcaggagatccagcccctgagcaaccttccacggcttttgtcgcccccattggcgggaggagcagggttatgctcccggctcccgtaggggagctccagcctctggctctgtcagcctccccggcagctccttgactccttcctcccagtctttcgaagaggggcccaggcaggtgcttcgcggggtccaggaagagggcaggcgcggtgcggctggcgcgggttcggggccccgggagggcggccggacgccccctggagccgcggcctgcgggggcggggcgagtgggccacctccgggccacgccgcgcggggacgaggcgaggaaggcactgcctgtccccactcggggggcttgctggccgccctggaggtgccttcccgggagcggcggtgtagaccttgtggagagtgcctcctgatgtggaaccaggaaccgcagcctctttctagacgctcagccgcccggtggagttgttaccgccacgatgacagctctttacgccttccactccgtgctgggttcagttggcttgctgttttcttcagagagagcgatttggctacatagcttgaattttctacgtgtctcgtgctttactggacttgcactgtttttccctcttggcagtgtttaatcgggtgacttttcatagaaaacgttcagtattttcatctgtgttaatggcataactttcttcttgactctgccctaagctaatgttaccagtttagagggatactttgggaaaaggtccttagaacctgggttgacataagtattttatctgctggttgcacgttttttcctttgcattgtttttctcctatacaagatggtaattgttggactcttggtgttctttattctctctctagaaggaaatcctcttcgcgcatctttctcgtgttctggccctgcggtactcttgggtacgcagaggactgctgctaacagtgctggcgcctggaacgctgcttggagatggcggtggcattaagctgctgcttttcctcagacttcctcctggcacccttcttaatttgtcaaactgacccagttcaaacttcaaacttttagtcactttatttatttcgtcactttttaaaaaaattgctttcaagataccaaaattgcgtaagcctaaatataaaaagaggtgtctcaggggccgggtgcagtggctcacgcctgtaatcccagcactttgggagattgaggcggggggatcacttgaggtcaggattttcgagaccagtctggccaacatggtgaaaccccatctctactaaaaataacaaaaattagctgagcgtggtggcacatgcctgtagtctcagctactcgagaggctaagacaggagaatggcttgaacccgggaggcggaggttgcagtgaaccgagatcatgccactgcgctccagcctgggcgacagagtgagactccatctcaaaaaaagaaaaaaaaagtctaaggatactctattcaactacatatgagcacttagcttcatcattttaatttttaaagctgccaattcttttagcatttgataagattactgataattggttaagatgatatattctgtaataattgcacattttttgacaagaaactcagttcacattcagtgagggttattttttaaaaacagtatttcttcattcattaagaagaaagttagggccgggcgcggtggctcacgcctgtaatcccaacactttgggaggccgaggcgggcggatcaagaggtcaggagatcaagaccatcctggccaacatggtgaaaccccatctctactaaaaatacaaaaaaattagctgggcatggtggcgcatgcctgtagtcccagagacacgagaatcacttgaacctgggaggtggaagtgagctgagatcacgcagctgcactccagcctggcaatagaacgagactccatctaaaaaaaaaaaaaaagttgggtaaattttgatcccacctgctattttgaaaaatgaattttcttttttagagcagttgtaagttcacaacaaaactgagtggaaggtatagagatttcccatgtatcgcctacccctacagagccaaaatctctcatcagagtggtacgtatattacaattgatgaacctacattgacatgttatcacatccacagttaggattcattcttggtgttaaacattctgtgggtttggacaaataacccttttgtttttatcaagaacttttgagagttgtagagaactgaaatggatattgtcattttaaaaagattaaagagactattgcagacatcttaaacattaatttcagatagtttttgtgttttataaattgaatgtttaaatttttggttacttatattggaattcccaagagtcacatttatttttgtatattaagaactaaagggccccacatggtagctcacacctgtaactgcaatttgggaggtcaaggcaggaggattgcttgagcccaggagtttgagaccatcctgggcaacaaagtgagacctttctctatattccaaaaaaaaaaaaaaaaaagaggccaggctcggtggctcatgcttgtaatcctagcactttcagaagccaaagcaggccaattgcttgatcccaggagttccagaccagcctgaacaacacggcgaaaccctgtgtctacaaaaaaacaaacaaacgaacaaaaattacccagatgtggtggtgtgcacctgtggtcccagctactcgggagactgaggtgggaggatcacctgagtccagggaggtcaaggctgcagtgagccatgattgcatcactgcactccagcctgggtgacagagtgagaccctatttccccccacccccaaaaaaagcaagagatgagggaggataaatgtttcataaaataacaaaatgttgttttcagtcgctaaaattcacttgactatgtcttttttttttttctgaacaaaatggtttatattagccaaagaaacaagagggagttgagcattttaaataaattaatttttgtttactcatgtcaagatatgtctgcaataaaaatgtcacccattagtctatttttaaaaattctgttttctctgttttgaggagcttttatggaagcaccagactataatattgttctgagctcacttctggtactacacaattctctattagaatcccagatctccacttattggctgtgtgagcatggcaagtaattttctaaacctctttccttagctgtggaagggggataaaaataatacgtacttctattttaccagaattgaggattatttggtgttgtatgtgaaaacattctctaagctataatcaactataatattcattgatattactagtcacatgctgtattttaaaatgctgccagtacaatttattttctggtggatattgctatatagatactgtcagctgctttttttttaaatgggttggtcatgcaagaaagtatattgtttggtttggttatgaatgatttagttggttcttatgagtcagagagagaattatggaagagggttggagggaccttgggaaattttctacttcatctctctgactcttaacctgaatctgttagcgtgagcataaatggtcttccaagggtctgtgaactctgtatatttatacttttctggggagaaattaaatgaaaatttatacttttctggggaaaaattaaattaaaagagcatcatgaccttgttcccactaaaggtttaggaaaccactagcttcaatgatctaggcaggtttctttagtaaaaatgttagagattatttttaaaattagttttttgtggaaaggaaagagaaacaggttatattgcggaaaggaaagagaacaggctatttttgaagcactgagtatctgtttttcttccaaagctagaagttgatatttatgatacactaccttcatatgaataatagtgctgctacttctacctggaagtggtacctttgattgattcattatcattaggcaggtattgtctactcctctcttcttccccacccccagccttgatgggcaatacagtggaggcagagaatgggactttaatacaatccagcatgtcagaatattatttaaaatgccaaaagataatttggcttgtttattctaaatttggatgttctttgttttcacaacaaaacacccaatgttaaagaaaattaagtgtttaatctttcaaactagatgatgatatatacataatctgttgtatgatatttcttgtatatcatagagtataaaattttattaaatcctaattgatgatcactttgacttttagtactgctagtttgaaaagatggatatgtatgttttcaagaaatttacagtttgcttttgtagattatattataatttgtgattttcatttataacatttaaaacttatttgctttttttgaatttctgaatcggacatacttttaaatctgagtttattcttataagaataagcgtttggaattttgccctgttttccttgtataatgattgctgggctataaggctttacagtgtaaaaccaagttctgttctggatcagttactagtagcattcccaaggctgggagagtatgaggtggatcaagtgatgctaaacaaacttgtgaatgaatctgtccatcaagtaatgtctttttccttgagatctttttttcctttgatattaatattttcatttaaagttgaaatgtttttcaaagttcaaggttctaaaccaatatttgggaatttatagaataaagtagcagaagtgtggttctttgtaaaaatagtctgagaagtctgaaatagacctcaaagattagtagtagagatgaatgccaatattgcagcatactttatatataaaagataagtcactacgttggatctttagttattttaatgcagaggattgcttaactttaataatgaaagtttgaattaaattaattagatatggaaaacaaaagggaataatttcagcaaaaattttacctatgggaatccaatcattttaagatcagtgatttgtatggcttctcctacacttaaaccttaaaaaattctggccgagcggggtggctcacgcctataattccagcaccgtgggaggccgaggcaggtggatcacttgaggccaagagttccagaccagcctggtcaacatgatgaaaccctctctctactaaaaatacaaaaattatctgggcatggtggtgcacagttgtaatcccagctacttgagaggcggaggctggaggatcatgtgaacccaggaggaggaggctgcagtgagctgagattgtgccactgcactccagcctgggtgacaaagcaagactccatctcaaagaaaaaacaaaaccaaaaaaaaacctttaaaaattcctgaaacatttcctgtatagggagaatattattaataccactattttggttctcattgtcatttacacataggcacctccatacagagataacattaattctgtctttggcctagtgataagagcttgggctttgtagtcaggcaagtctctattgaatcctcgacattgcacttcatagctatgagaccttggttaggtgtcttaacttctctgggcctcattatccaaaactgcaaaaaaataggaattttacctctttgagttatcccaaggattgaaatgaatacatgtaagtatttaactcatgatgacaattatatatatatatatatatatatatatatatatatatatatatatctgttatgtgccagtttgttaactcatttaagttttatagcaatcctatgaggttgatactattattttcctcatttttacagatgaggaaactaaagctaatgaaacgttatgtaacttaaccaatatcatacaatgaatatacaactaataagtagatagaagcacccaattaatgcttgctgttgtcattaaaaaaaaaaagatgacttagggtattaccatcttttctatagtgggttcctaataattgcaatctcatgtagagcattataaagcatattttatttctttgctggaaaaaatgttgattgcaggactgtgttcctgaccaaggactcaggatcacataatttataaaagtaataacatctgtttattgaatcttactatgtactagatacagagctaaatactttatataaattacttcacttacccatcacaacaaccttagagctgaggctcagagtaattttaagtaacttgcccgaggctgcacaattaacacagaatcccaaaactgtctagctctaaagtgtctgctgctaaccgccagtttatgtgccttgtgtcgcgtatggctgacagatatctctcaaaagcaaggcaacagcttctataattttaaatagcaaaatgtgctactgtaattttgaaccagaaggaaactgattacctactgcctgtaggctaaaccaagcttgctgcctgtttttgtaaacaaagttttattggaacacagccatgctgtgttcttttaaaaataaagacattgagacacagagagattaggtaacttcccagtaatgtagctagtagtaatctaatgtcagtaactatgttaataagcctctgaaagtctgccaatccctgaatcccatgctaccccctaaactctatgtaagctcagcaatgtgctctattcagagggaccgtgcctggatggcatagctatcccttcagtaagtagtaaattcagctttgtgcttttcgtttggtttcaaacatccagtgtgaaatattccatactttgatacttggcaacaaattattgataaattaattttttagtaggcattgttatcttaagtacaaccctgtcacttctctgacattctcaaataaaaataatgagtaatataggcccctgttaaggttcatgcatgtagttcgcatatttaggtaaaattcaagatctttcttttaatactttatactagacttttagaccactatgattgtgataaactaagtggcccagttcaaacaaggaaatgattactgtaaggtgtcaaaggaattcctttttaataaaacagatcccaaaataaacatcttacaaagtattcagtgtagtgaaaatgttgtttatagaccctagaaatgacattagtatttaacaagcaggctttgataatagtagtatctaatattgcgtgtgtcatttaaggatggggatacactcttaagaaacatgttaataggcaattttgccattgtgcaaacgtcatagagtatacttacacaaacctaggtggtatagcctactacacacctaggctctgtggtgtagcctgttgctcctgggttacaaacctatacagcatgtagtaacatgctgaataatatagtcaatactgtaacacagtggttacctattcgtgtgtctaaacagaaaaggtacagcaaaaataaagtgttataatcttatgagactatcatctatgcattggtcaccatcatcatctattgtggaccagaacactgatatgcagcacatgactgtaaagactgtaaatgctattgttaagaaaatttttttttttctttttgagataaggtctcactgtgtcgcttaggctggagtccactggcaagatcatggctcactacagccttgacctccctgggctcagatgatcctcctacctcagtcccctgagtagctgggactacaagtgcaagccacctcacctggctaattttttgatcttttgtcgagactggctctcactatgttgctcaggctggtcttgaactcctggtaggctcaagcagtcctcccagctcattggtaactggttgtttttagcttttcagttttcaaaaaaaaattactaggttgtataactcacagcctaagtcatcaagatatttcttaaaaggtggaactgttacatgagagggcacgtaaattaaaaagattttggatatcttagctaaatggagcctaggaaggcttatatgaacagcagtgtgagagtgtttatttcctgacagccctaccaattttattttttgtctttggcaatatttaatttcattgattaataaggatttttaaatattctcattgatcattttccctttcattaaatctaccttttttctatacgtaaggacagttttcagcagacagtgttgctgtactactaactgaaggccatgttattgttggtctttactcagttattgttcaagaacacatctgtctaaaagaggactctgacatcgagctgttgcaggcatctaattcacacttaagtttaactatgactttgacttcagcaccagtgacctctctaatcagtctttccagtaacctactagatctctccattgggtctcctatcagtgttgaatttcagcacgccctgacttccagttaggaaattattctttccaactcagtgatctcggctcattgcaacctccatctcccaggctcaagtagctgggaccacaggcatgtgccactatgcctggctaatttttgtattttttgtagagatggggttttgctttgttgtccaggctggtctcaaactcctgggctcaagtgatctgcctgccttggcctcccaaagtgctgggattacaggcttgagccactgtgcctggccaagaaaaacatttttttaaagtcacggcagtaatttgttggaagtcatgtatactttgagtaggaactattgaagctattatacagtttttcaaaccagcagattctcgtttaatgattggtatattttggactgtttgattcaaaattttaaatgtaaataaaaaggaaataatgagtatagcctacttttttcctgacttaaaagtaaaaatggaaattttaagaagagtattacctttgaaataaagtgattcaaaaattgaagtaaatgtcttatgcacagtgttactttagttaaaattatttaagcatacattaatttggattatagtagaaaaataatctctagtgttcataatctgttcatccattataaaaatattttaagtacttctgtttgtttattgtgttatatgtgtttactgaacatgggagtaatagcagtgaagagagacggtgcctatactttaggggcttatgtagtgttacagggaagactagtagtgaataggcacttataagtattaagtattttgaatttgaccaaaaattgaatagggtatactttgtgataagtataatgaaaaaaatatcagacttttgtgggagcacagaggaagtacactaggaataggaagatgttttgggatggccttcctgagcagatgaacctgggctgatcttagaagatgagcaagagttagcaggagagaggggtggtaaagggcatttcagaaagagcagaaagcctgaaaggaggcagagaggtgtgaaatagcctaaagtatgtggaaaattaaacacattcaggttttgctctatggaacatggggtggggtttgccattttgttatttcacaagtatgcaagaattgattttggtaaatgcacacacgtcttccatcaactttcaggggtagctctaaaattaatcacatactgctataaaatataatcttttgtatccaaaatcttcatctaactgaattgtaaaataacttctttaattattattattattattattgagatggagtctcgctctgtcgcccaggctggagtgcagtggtgtgaacttggctcactgcaagctctgcctgccaggttcacaccattctcctgcctcagcctcccgagtagctgggactacaggcgcccgccaccatgcctggctaagttttttgtgttttttttagtagagacggtttcaccgtgttagccgatggtctcgatctcctgacctcgtgatccgcccgcctcggcctcccaaagtgctgggattacaggcgtgagccactgcaaccagctggcattgagttctttaagaggtgctttcaaagtgccatttggggctgggcgtagtggctcatgcctgtaatcccagcactttggtagtccgaagccggcagattgctggagctcacgagttcaccaccagcctgggaaacatggcaaaaccccatctctacaaaaaatacaaaaattagcccggtgtggaggtgtgtgcctgtatgtagtcccagctactcagaaggctgaggtgggaggatggcttgagcccggaagtcagagattgcagtaagccaagattgcgccactgcactccagcttgggccaatagagccaggccttgcctcaaaaaaaaaaaaaaaaaaaaaacccaaaacggaacaccaagtgccatttggagttcctctttctgtttagtagtcttttgattaatgtgtagtatgaaaacacagtcactgtgctgcaaagagttatgaggataatacagtgtaaagtgagttagtacagtattcagcgtaatggtattacatattaatatcacatgctaaatgtgatagaaattataagtacaaaggaagctagagaacgagaataaggtggtctggcttagcacaatagtatctttaagcttttgctatcagtcctgttttctgtaattcattggaaataatgtttacttataaaaatatattagttttgttacatatgctctgcgttgaactataaacctgtctgcttctgtttgaagtattttctcttcataacttcctattttgttgatcgatatgcctttactggcacttagaggagcaaaaaaaaaggaatcagctttctgtctgcttcattgtcataatatgccaacatgtgatagaaatggacatctgtagcatgttatgacaatgatgtgccacggatgtccatttttttcctctctgttgttttgtgcttttaatcttttaatatatttgaggaaggaggaatatcatttatttttctccctaaaaatcagaatcttaggcatatttttaaaaaaattctgattgttttaaattctggagtgtaggttgaattacatatttacttgatactaatatacggactttataagtcctaacgtctactgagtttcttaggcagagtgaatagtctttgagtaagtactcttttcctgcttctgtcttcctgttctattatatataatagattttttaaagttgaggacattgcattatttaaacagaccattttaagagaatttggtatagacagcttttgagctgttgtgtcctatccaaatctgaattcaaatgtaaaaataattttataaaagtgaatatttattaaagcccttttcatagaaatagtacgctgacaaatgaaaacattttgtgacaacaataataaaactttcactagatagagctagagtagtttgatgtaagggggaaaagtatatggtcattttgaactgtatgcattttaacttagtaaagtttaaaaataagatattagtgatacctgctgtcataatactcatataggacacaaaatatggcatgacaaaataagtgaaagaagactcctgggcgcagtggctcaggcctgtagtccccgcattttgggaggcccaggggggaagatggcctgagtccaggagttcaagaccagcctgggcaacatggcaaaaccccatctctacaaaaaatacaaaaattggcccagcatggtggttgcatgcctgtaggattgctggagcctgggaggtcaaggctgtgataagccgagattgtgccactgcactgtagcctgggtggcagagtgagaccctgcctcaaaaaaaaaaaaaaagaaaaaaagaagaagaagacaactcactagactaacaagagttgaccaaggtttgtttgtttgtttgtttgtttgtttttggctaagcataggggactttattaatggtacatgacaaggtggggctcctgggcccctccctcttcaggagttctacatggaaagtgaggaggggagattctcagtgtagtgggggactgagtgtggcagggactccccagcagtgacgacctctctcttcctctcatgctctctctggggctggtggtctggtggtcttccttttggaggccatgtgggccatgaggtccacgaccttgttgctgtagccaaattcatcgctataccaagaaatgatcttgacaaagtggttgttgagggcaatgccagccctaacattgaaggtggaagagtgcgtgttgctgttgaagttggaggagacagcctggtgctcagtgtagcccaggatgcccttgagggggccctccgatgtctgcttcaccaccttcttgatgtcatcatatttggcaggtttttccagatggcaggtcaggttaatgaccgacaccttggcagtggtgacacagaaggccatgccagtgagcttcccattcagctcagagagggcctttcccacagccttggcagcaccagtagaggcagggatgatgttctggagagccctgcagctgtcacgccacagtttcccagaggggccatccacagtcttctgggtggcagtgatggcatggactgtagtcatgagtccttccacgataccaaagttgtcatggatgacattggccaggggcgctaagcagttggtggtgcagaaggcattgctgatgatcttgaggctgttgtcatacttctcatggttcatgcccatcactaacatgggggcgtcaacaaagtggggagagatgatgacccttttggctccttcctgcaagtgagctccagccttctccatgggggtgaaaacaccagtggactccacaacgtactcagcgtcagcattgccccatttgattttggagggatctcgctcctggaagatggtaatgggatttccactgatgacaagcttcccattctcagcctttacggtgcatggaatttgccataggtaaaatcctactggaacatgtagaccatgtagttgaggtcaatgaagcggtcattgatggcgacaatatccacttttccagagttaaaagcaaccctggtgaccaggcatccaatacgaccaaatccgttgactccggccatcaccttcactacctcagcgatgcagctggcaatgcatgagaagatgcagctgtgtgtcaaatgggaggagcagagagccaagttgacccagtttttttcattgggggaaaaaacccaacccatagagatcgtgttaattcagtcactcatgactccggctcattgtcggcaaatacatagatattgttaagacacagtcttcaaaaaagagtagactgtgttaagcaggcaagtctaaaatacaaaagaaaaaaagtgaacgagttggagaaatacagcgtactatgggggttcacaagaaagatcacatcccattgggagaattaggaaataattcataaaaaggaattatttaagttgggccttgacatcattccctcacaaggaatagcttgagcatttgcaaatacatttgaggaaaactgaataattaaatctgtgatatagtagaaaaagaatggacttaatcacagctggattgaaaccccatctcccaccatttctacagaactgtgtggccttgggcaagtcagggatgttagaaccatccataaggtgatgcttaaacaagagtatatttaagattactggcaaaataggtggtgcacagtggtttaataagtagtttttccatcttctttccccctttccctactttatgtaaaaaatgaatggagaaaaagactggaaggtagactagagccagagcaatgaggaccttgaatgccaggataagctgagctacatacattaagcagtttggaaaggacagtttgagttagataaatccagcagcatctaatccttgagagatgtttattgatggcaaggaggaatgtggtgattggttaggggaagtcactacaatccaggttagtatgtggatctgaactggagtacaatgagagagaatagagttcaatgacaataggaagaaagggatggatgaacagagatttttccaagtagaatccaggagaattgaagtggataggttgtgaaagttgagaggagtcaaatatggctcatgttttgaagtagggtaactgaaaaaatggtgttgctacttgtaaaagtaggggaatctaaaagtatagtgagggagaagataaggaccttggtttttcatatattttgttctgtaattatatttcacttctaaagtgctttgaactgtagtgtggtagttaatagcacaggctggggagccctgctgcctaggttcacatcctggctccaccacttacttgggcttcactccatcttgctgtgcctcagtttcttcagatagttagggcacaaaatatggcatggcaaaataagtgaaagaagactcctgggtgcagtggctcaggcctgtagtcccagcattttgggaggcctaagtgggcagatcgcttgagtccaggagttcaagaccagcctgggcaacatggcaaaaccccatctctacaaaaaatacaaaaattagccctgtatggtggtgcacgcctatagttccagctacttgggcagggggtgctgaggcggaaggataaagggcaaaataaaagtagctacttcatagagttgtagtgaggactaaatgatttaatttacatgcaattagaacgatgacggcagatagtgttttctatcgtgatgctgatgtcttcctttgtgtgtgtgtgtgtgtgtgtgtgtgttttcttgagtcagaatcttactctgtcaccccgggtggagtgcagaggcatgatcacagctcactgtggcctcgacctcctgggctcaagcgatcctcccacttcagcctcccaagtagctgggactacaggtgcgtgccaccacatgtggctaactttaaaatctgttgtagagactggatcttactctgttgcccaggctggtcttgaactcctgggcccaagcgatcctcctagcttgtcctctcaaagtgctgagattacaggcatgtgccattgtgtctggccagcctttatattttatttttatgggctgatttatcccttaagcagtagagtggcttgtgattatattgccttgtgtcttttgagttttatcctgagtatgttggaatgcaacaatctttttttccattttattttttatcatatagcaaaattgacatttttggggtacaagtccatgaattttaacaaatgtgtagatttatctaatcatcacccaaatcaattttaaattaacacttaaaaaagatgcaaaatagtttcatcatcccataaaactctctttttgccgtctccttttagtcatactctttccctgcccctcatccctgtcagccactgatctgtttttcatcactatgattttatccttttgaggatatcatataaatggaatcatagagtatgtagtaacctactgagactggcctgtttcactcagcagccattgagattcatccaggttgttgcatgtaccaagtttgttcctttttattgtgaggtagtgttctattgtatgggtgtacccacagtttgtttatccattgacttgttgaaggttatttggattattttcagtttttagcaattgcaactagagctgctatatgttttcatatgcaagtttttgtgtaaacacgagcattcatttctctaggttaaactgccaggagtcagattgctgggtcatagtataagaatatgtttaactgtgtaagaaacttccaccttttttttttttttagaacagtgatgctgttttgcattgccaccagcagtatatgaaaattccaggtgtttcacatcctcaccagcacttggtattgttagtattgtttattttagccattctaatagatgtgtagtggtatttcattatggttgtggggtgtgtgtatggggatgtggcaggggctatgttgcttaggctggagtgtagtggctattcacaggcatgatcggatgatagtgcactacagcttcgaactcttgggcttaagcagtcatcctatgtagctgagactacaagcgcacaccactgtgcctggttcattattttaattttcatttacgtaatggcagtgatgttgaacatctttttgtgtgcttattttccatccatgtgtcttcactggtgaagtgtcttaagtctttggtccatattttaattgagttgtttttcgttaagtttgaaagttttatatatttgggatgtaaattttttgtcaaatatgtggtttgccaacatttttctcctgatttgaagcttgtctttttattctcttatggtgtctttctcatagcaaaaggttttaattttgatggagtccattttagcaatttttttctttcatatttaacaactagtagcctgaccccgagtcatgaagtttttctgtgttttcttcaaaaagttttattgttttaggtatagttatatatataacataaaaatatattttatatattatataaaatggatcagaaactatataaaactatagccaggtgcagtggcttgaagttccagactacagtgtgctatgttatgattaattttttgtgtgttcaccttgtttttttttttttttcttttgtgagacagagtcttgctctgtcacccaggctggggtgcagtggcacattttggctcactgcaagctccgcctcccaggttcacgccattctcctgcctcagcctcctgagtagctggcgcccaccaccacacctggctaaatttttgtatttttttagtagagacggggtttcatcatgttagccaggatggtcttgatctcctgaccttgtgaaccgcccatctcggcctcccaaagtgctgggattacaggtgtgagccactgtgctcagccatgttcaccttgtttttagtgaccttgctaaacttactagttctagctgttccttgggaatggtttacatagacaattatgtgtgctgatagggacagttttgtttctttccagtctttgccttttctttttcttgctttattgcactggagataacttttacttcctatgtggtttttcttctttagtatgttgttgtggtggtttagtatggtttaatatgctggtaatatggtagactatatttttttgaatattgaagcagccttgcataaactcttaggataaattctacttggtcgtgatcattctctatattttgctggattatatttgctaatatttgttggggatttttatgtctgtattcatgagggatattgatttgtagtttccttttctgtactatctttgttttggtatcagagtcataggttttctcatgaaataagttggaaagtgttttctcctcttccgttttctgaaagagattttgtagagtcaaggctatttcttctttaaatgtttggtagaatgtagtgaaaccatctgtgcttgaagattgcttttcaaaccgtgatttaatttaatagttatagcaatgctcaggttgtcttttgggtgagttttggtagtttgtgggttttgaggaattggtccatttcatctaagttgtcacatttatgtgtgtagaatttttcatagcattcaccttacttacctttttaatgccagtggggtttgcaatgatagtctctgatattgcagattttagtgatgtgtgtcttccctccccgccttttttgccagatgtttatcaattctgttgatcaacaggccaggtgtggtggctcacacctgtaatcccagcactttgggaggctgaggcaggtggatcacctgaggtcaggagtttgagaccagcctggccaacatgctgaaaccccgtctctactaaaaatatgttgatcttttaaaaatagcttttggtttggatttttatctattgttttttattttcattttaattttgtttgtgctgtttatttccttatgcttgctttgagtttattttgttctttttctagtttctggtttctgaaagtaaaggcttagaatattgatttaatactttctctttttttttttggagagggagtctcagtcgcccaggctggagtgcagcggtgtgatctcggctcactgcaagctccgcctcccgatttcatgccaccattctcctgcctcagcctcagagtagctgggactacaggcacctgccactacgcccagctaatttttttgatttagtacttttttttgatgtaagcacataattttctgaactttcacctaagctgcttttttacctgtagcctacaaattttgatattttggtattttatattttcatttttgttaagaactaacttaatgaagaaatttctaatttctcttaggacttcctctttgctccatggattatttagatgtgtgcatttaatttgtaagcatttggagagttttctgttgtctttattacttatttctagtttaattccgttatggtcagagactacattttatacaatgtaatttcttttaaatttgtttagggttgtttattgactcaggatatggcttatataggtccatgtgcacttgaaaagaatgtatattctgcctttgttgggaggagtgttctataagcacccatgaaatccagttggttaatgatgtgttctgttcttttatgtcattgctaattctctgctaactagttctataactgaagaggaatgtttaaatctcttcaattataattgtgaatttgtctgtttctccctttagttctttttggttttgctttgtgtattttgaagatttgaagatttgaagttaggtgtatgcacatttagactatactatgtctttgggaattgacacttttgtcattatgtagtgtctttttttattgcggtgaaaaacacaacataaaatttaccatcttaaccattttcaagtgtacagtacactagtgttaactatatgtacattgttgtccagcagatctctagaactttatcttgcaaaactgaaatgatacccattgaacatcttctttccacctctcttggcaaccaccattttactttctatgaatttgactgcttcagatatctcatataagtggaatcagtggaacttgtctttttgtttctggcttatttcactttgtataatgtccttaagattcatccatgttgtagcatatgacaggattttcatcatttttgaatctgaatggtattccattgtatgtataaatcacattttctttttccatttatctgatgatgtacatttaggctgcttctacctcttggttgttgtaaataatgctgcagtgaacatgggtgtgcaaatatgtctttactatcctgttcttacttcttttggatatatacctagaagtggaattgctggattttatggtaattctatttctaactttttgaggactatccatactgtttccatagcagctatggaagccagtttacattcccaccagcagtggaaagggtttccagtttctctaagtccttgccaacacttctttctttccccatcccaacaggtgtaaggtgatatctcatgattttgatctacatctccctgatgattagtgatattgaacatctttttatatacagttgactgtcagtatctgcaggttagacatccccagattcaaccaaacatggattgaaaatgttttttaaatccaataaaaataatacaaatttaaaaaatataacaactatttacatagcatttacattgtcttaggtatcataagtaatctagagataatttaaaagataatttaaaatatgtaggaggatgtacataggttatatgcaaataccataccagtttatataagggacttaaggatacaaggattttggtatctgcagggatcctgcaaccagtcctctgaggatactgaagaagggctatacttcttggccatttatatatcatctttggagaaatgtctattcaagtcctttacctttttttttttcttttttttttttttttttttttgaggcagtctcactcggtcacccaggctggagttcagtggcatgattacagctcactgcagccttgaattcttgggctcaagtgatcctcccaccttagcctcctgagtagctgggactataggcacatgctaccacgtccagctaatttttgtattttttgtagagacaaggtctgtgttgcccaggctgatctcgaactcctggggctcaaacaatcctcgagtatcagcctaccagtgttgagattataggagtgagccaccacacctggcatgtttttggtttttgtttgtttgttttgttttgttttgagacaggtgcttgctgtattgcccaggctgaccttgaactcctgggctcaagtgatcctcctaccttagcctcccaagtagctgggactacagtcattcaccagccattgcacccaaccttttgcccattttaaaattgggttcttcattttttttttttgttttttttttaattgagttgtaggagttctttgtatatctggatattaaccccttttcaggtatatatttgcaaatactattttcttccattctgtaggttgccttttcttctctattgattgttttgctgcatagaagttttaaagtttgatgtcccatttgtctgtgtttacttgtgttgcttgtgctttttacatcatatacaagaaatcattgataaattcaatgttgtgaatccttttccccacgtgttttcctccagtagctttatggtttcaagtctagtcattttatggtttcagggctacatttaggtctttaattcattttgagttagtttttgtatatggtgtaaggtgagggtccaacttctttcttttgcatggaatatttttatatagtgttttttatcactaacaattttatgtgtttgatattatagctactcttcagtttttaaaaattctttagggtttttttgttgttcttgttactgttggcgtggtgtgtcttctttctatccaattcctttaacctatttgtgtctttatacttaaagtaggtttttttcttgtacgcatttgatagttgggttttgctttttcttatccaatctgaaaatctctctttttaaaaaagtctttacttgagaccattgtagattcacttgcagtggtaagaagtaatagatcttatgtttccttcacccagtttccctcaatgataacaacttgcataacttttgtactaggaaattgactttgatacattgtctaaggacatttaggctgcttctacctcttggttgttgtaaataatgccacagtgaacatgggtgtgcaaatattcaaatttcacctgttttacatgcattcatttgtgtgtatgtgtatgttatcacatagagattcatatgatcactactgcagacaagatacagtacagttccatcacaagtatctcttgtgctactcatttatagccacagctactcctctcctctcctctcatccttccctaacctctggcaaacaataatctgttctccacctctataattttgtcattttgagaatgttatatagatagaatcatactgcatggctttttttattgagcatactttgagattcatccggttgttacatgtttcaatagcttgtcccttttgctgaatagcattcctgagtctctgcctttaattggaagtggttagtctatttatatttaatgtgattattgatattgttgagtttaaatcaaccatcttactcagggatcagcaaactatgagcttggggattaaatcacactcaccaagtgttttttcttattttattttattagacacagtctcattctgttgtccaggctggagtgcagtggtgtgatctcagctcactgcaacctccgcctcccgggttcaagtgattcttgtgcctcagcctcccaagcagctggagttacaggtgcatgccaccatgcctggctggtttttgtattttttagtagagacggggttttgccatgttggccaggctggtctcgaactcctgacctcaggtgagccacccaccttggtctcccaaagtgctgggattataggcatgagccactgcaccgggccactaagtggtttttttttttttttaataattaaagttgtattggaacatggctttatttatttatttatttatttatttatttactattgtctgtgactgcttttgtgttacaatgacagagttcagtagttgtgatagagacccatatggcccacaaagccaaaaatatctactctgtggccctttacagaaaaagtttttaagccctgattatgctatttgttttctatttgtcccatctgttttttgttgattttgcagcaggaatgtgaatttaagagagatattacagtggctggtgcctgttagaatatctatagatgctttcctcagataaaattttagacctgacagaaggtgtctatattcattttttattgtgtgtaacaaattaccacaatttagtggcttaaaataacatgcatttattatctcacagtttccgtgcatcaggagtttgggcacagtgtagttgagtcctttgcttaggatctcataaggctgcaataaagctattggccaggctgtattatgtagaggctcaattatgaagaaatctgcttccacacttattcaggtcattggcagaattcatttccttggagctgtatgactgagggcctggctttttattgactgtcaggtgaaagcctctctcaggtcctagggattgcctatagtttccctgctacatgactgtctccatggtggtttgcttttcaaggcctgcaggaaagcttcttactccagtctgctcatactgtattctataatgtaacataatcaagagagtggcatctcatcactttcccacattccgtcaattagaagcaagtcacaggttcttcctgcatgcaaggggattatatgaagacatgactcattaaggatcactgtcatgtatgtctgccacagaaaccataagaaggcattaataactgtaatctataaccttacattaaccattgatttctgtcaaaagctggaaatgatgagattaacaataaagaacctaatgtagctaaagttctggttagaatatttagagttttctgaaactacataataagcagagctttccactctaataataccaatattttaaacaagcacttgtaaattcattattgtatttgatgtatttctcaggatagtgccatgaggtagataggtatccctgtttatagatgaagaaactgaggattagtaaagcctcagttttacaaattacacagcctcaaaaaaaattacacagccagtaagtgatggaataggtgtttcattagtaacttaaaatctctgtttctgtcaccaaagtagaattgtagcatagaattatggatggtgtggatattcatcaaatatgctttgatgatgaggaaagtttgattttatatgtaaatactaataagttctatgtgaaaatgcaaataaaatgagatctttttaagagtgcagcatttcgtatgtttggcagtaaaatatttttaatcctcaaaatatttccttaagtggtatctctattttacagaagagatcgaggtctaagcaggttgtcatttgctcaagctcatacagttggtatgtggtagaaccatagtctgacttcagaatctaggatgaacctaattcaatcaaaatatccttctgttttggcattgcattactaaattgtatagctggaaggcagctatactagtgttttactgtatatctctattccagtaatttcatctctacttaattgttatcatctgttaagtgggattgtttatctgcacttgatagtaaaatacggtctacttaggcttggatgaaaaaatctttagtgaactttacctatcatctataggatcatgttgttctgctaaaaaaaaaaaaactcccagttaagcctcaaaacttaagatttttagttcatggccacgtatgatggttcaagcatgtaatcccagcactttgagaggcctaggtgggtagattgcatgagcccaggagtttgagaccagcatggggaacatggagaaaccccatctctaaaataaaaattaaaaaatagaaaaattttagttcatggcctttctctttgaagatagcatattacacatctcaaaagtcatgtgctcaagtcagttgttcttgttggattttaaaggagttcctttattgatataaaataattagcaaaagtgaattatgtgttatttagcataaaaacaaagtttttgttcttttataaatatgattgatatagttattttgcatatatagtattaacaaattatagttaacaataatttttttcttttcgtttgtctctacctgttttattgttgatttttcagtcacagcaaactgtacaatggcagttgagtgggttttgaaaaacgtctgaattgtagtgtctacatctaccttctgccttctctctaccctttgaaaaaaaataaatggcatgtttgagaagagagctctattaaaagaggaatattgcaaatggcttcagattctatgagtagtaaacaagctaggaatcacattacaaaggggaaaaggcaacaacagcaccagcaaataaagaacagatcctcaattagtgatggtgatggagaagattcctttatttttgaagcaaatgaagcttggaaagattttcatggttctcttcttcgattttatgaaaatggagaactctgtgatgtcacactcaaggtgagattgccttttttgtacttttctcaggcctcttcagtgtaatatgagaaatgggggtttctgtaaccatacaaggcaaattttgttgctatacatatttgatacagtcagaatgcttttagtctcaatctttttttttagtgtaggagaaaggacatagagggtaaatgaagagaagttagcataagataaaattattgtactaatttaatgttgatattcattatctcttagttaacttctgagagttctgaaaccctagaacaacaaatattattagtgaaattaataaattgctgttgaccagataagcttttcacttgtgaatttaaatatcttgatgtatttgcttactctgaatacagaagtaagttagaagtcaggaattttggattgtttactcagctatactagtgttttactgtatatctctattccagtaatttaatctctacttcattgttaccatctgttaagtgggattgtttatctacacctgatagtgaaatataatctacttagccttggatgaaaaagtcctcagtgaactttgctcatcatctgtaggatcatgttgttctcctaaaagcaaccagttttaataaaattggaaaagtgataaagcagtatggaaaagcctttgttgattgtttctcattacacatttaaagtactttcttcttatctctcagtgaaatattaaaattttttggtgaactcttgggcttaagcagtcctcctgccacagccgcctgagcagctgggactagatgcatgcaccaccgtgcctgactaatttaaaacattttttttgtagagatggggtcttgctatgttgcccaggctggtctcaaactcgggctcaaatgatcctactgccttgggcctcccaaaaagctgggattataactgtgagccactgtgctaatgatagataattatttctcatagttctgaaggttgggaagtctaaaatcaaggtaccagcaagtttggtgtctggtgagggctgccctctctgtttctcagattttgcttgttacagcatcctccagaggggatgaacactgtgtcctcacatggaaggcagaaggacaaaatgggcctaagctagttccctccagtcctctcttaaggcactaatccattcatgagcacagagcccttatgatttcatcatttcccaaaggttccccctcttaatattagcacagtggggattaagtttcaacacatgattttggaggacatttagaagatagcacagatgtaatttaatagaagagaaaaataataatggcgaaagtgatcctatagttaacacttaagcattctatattaagaaattttaagattctgtgtttaaggaagatcacctttacttcatccattccgctagtaaatcagtattttaatctttttcatgtttctcagaaaggggtataatcatgtgccacataaggacattttggtcaacgatggaccccatatacagtggtggtcccataagattagaatggagctgaaaaattcctatcacttagtaatgttgtagctatcataatgtcctagcacagtgctttactcacatgcttgtggtgatgctggtgtaaacaaacttacctcattgccagttgtataaaaggtataacacatggttatatatagtgcctaatacctattcatgctaataaatgattatgttacaggcttatgtatttactctacttcttattgtttttgtagagtgtactcttgctacttctaaagaagaaacattacataaaaaaagaaaaaaattgcagaaagttgattcttaataaaaacaagaaaagaaaaaacgttaactgtaaaaacagccttaggcaggtccttcagaaggtattcaagaggaaggcattgttactataggagatgacagctccatgtgtcctctcctttccagtaggacaggatctggaggcggaagacagtgatatggatgatcctgacttgatatagatgcaggctactgtctgagtttgtgtcttagtttttaacaaaaaagtttaaaaagtaaaagaaaaaaattttaagtagaaaaaagtttttggaataagcatataaaaacatttttgtagagctgtgcaatgtgtgtgttttaggctaagtgttattacaagagtcaaaaagttttaaaaaattgaagtttatggaaaaagtcacagtaagctaaggttaattatgaaagaaagaaaaatattttttttaatttagtgtagcataagtgtacagtgtttataaagtctacagtagtgtacaataaagtcctaggctttcccattcactcaccactcagtaattcaccccgagccacttcaggccctgcagctccattcatagcaaataccttatacgggtgtactttaaaaaaaataccttatactgtatttttactgtacctttcctatgtttatatgtttagatatgcagatagttaccattctgtttcagttgcctacagtgtgcagtacagtaataagccatgcaggtttgtagtctgagagcaacaggctgtaccatatagcccaggtatgtaataggctataccatctagatttgtgtaagtacattctgtgatatttgcacaatgataaaatcacctgacacatttctcagaatgtatccccatccttcaatgacacatgactgtattagaactgcttactacagcctacgtgtgtagtataagctacgtacataggctatatggtatagcttgttgttgctgggatataagcctgcgtagcctattaccatactgaaaactgtatgcagttgtaacacaatggtatttatctaaacatatctaaacagaaaaggtacagtaaaaagtaggcaaaggacatgaacatatacttctcaaaagaagacccacaagtggccaacaaatacatgaaaaaataactcatcatcaccagtcattagaagaatgcaaaccagaaccacaaagagataccatctcacatcagtcagaatggcttttgttaaaaagtcaaaaaataacagatgttggcaaggctgtggagagaagggaacacttatacactgttggtgggaatgtagattagttcagccactgtggagagcagtttggatacttctcaaagaactgagacttgaactaccattcaacccagcaatcctcctagtgggtatatacccagaggaaaataaatcattctatcaaaaagacacatatacccgcatgttcattgcagtgctattcacaaatagcaaagatatggaatcagcccaggtgcccatcagtggtggattggatatggaaaatgtgttatatatacactgtggaatactacacaaccatagaaaagaatgaaatcatgttatttgcagcaacatacacgcagctggaaaccattatcctaagtgaactaataaagaagcagaaaaccaaataccacttgttcccacttgtaagtgggaactaaatattgagtaaacatggtcatgaaaatgggaaaaatagtggtggatacaatatgggggaaggagggaaggcggtgggggtatgaattgaaataaactgtttattttatgttgtgtattatgctcactacctgggttatagattcatttatacaccaaacctcagcatgatgcaatatatctatgcaacagacctacacatgcacccctaattctaaagtaaaagttgaaaaaagcaaaatatgtatatatatttacaataaaagaaaaatataaatttaaaataaaaataaaactgtaagaatgaaggaatagtaaattattttttactttataaggggaaaggattataggcttattttattattttgagacaaggtcttgctctgtcacccaggctggagtacagtgatgcagtcatgggtcatggcaacctccacctcctggacccaaaccctactccaccccctgagtagctgagactacaggtgcacaccatcacacccagttaatttttgcactttttgtagagagggggtttggccatgttgcccaggctggtcttgaactcctggactcaagcgatctgtctgcctcagcctcccaaactgctgggattacaggcatgagccaccatgcctggcctctagtaatttaaaaaatatttccctttacatacagcttttaagaagcacaatgttattttatttgtatattatatatacactcttcactattcattttaaatacaaagcagatcttgagatatgtagaaacctaagccatctttaaagttgaggatgttcttatttataaaggttttcctttacattctgatttcactatttttgtaattataactaaactgtgatttgttataactcatgatcacaaattgagcatgtatctgtacctcattaaaattgtatttagacattaaaaagaaaaagaaaaagaggccacagatagctgctctgtgccttccaccatctgaagacacaaagaagagttggcatcagtgaacttagagcaagtccttaccagacatggatttgccagtgccttgatcttgaactttctagtctcaagaactatgagaaataaattatgttgtttatcagccacccagtgatagtttgttatagcagcctgaatagactaaacagtaagcttttttttttttttttaaagacagagtctcactctgtcacccaggctggagtgcaatggcacgatcttggctcactgcaacctctgcctcccgggttcaagcgattcttccacgtcagccccccgagtagctgggattataggcacccaccatcatgctcagctaatttttgtatttttatagagatggggtttcaccatgttggccaggctggtcttgaactcctgacctcaggtgatccgcctaccttggcctcccaaagtgctgggattacaggcatgagccactgcccctggccagtaggttattttttattttgaagtatcaagattattattacctacaaagttatgcaactgtatatccactataatagtatttacagtaatcaaaaagtcataatgtaaatgtcaaaacaacattgaaatagtaatgaataatatacatgtagagtaaaagatattaaagaagatgcttgcataagttgctaatgatgaatgttaaagtatattagagtagaagggcatttttcaactgatatggaaaattttcctgtatatataatggttaataatactaagataaaattttactttttctaaaattcttttttttttttttttttttgagatggaggctcactctgttgcccaggctggagtgcagtggcacaatctcagctcactgcaacctctgcctccgaggttcaagcgattctcctgcctcagcctcccaagtagctgggactacaggcgcgtgccaccatgcccggctaatttttttttttgtattttcagtatagacggggtttcaccatgttagccaggatggtctccatctcctgacctcctgatccgccctcctcggtggatcccgcccaaagtgctgggattacaggcgtgagctgcgcccggcctttactaaacttttttaagtgaagtggagatagtttacaaaataaatgttaactcttttttttttcaatagcaacaaaagcacagatttattgaaatgaaagtacactccacagagtgggagcgggctcgagcaagtggcactcgagccatgatgaagtcctaactagtggagttaggaatgctttgtatgttgatagtcaagtgctttactaatccaaaagccttattttcattgtatttccattcatattggctaatctctggaaaattactcaaagtttttattaatagttggtatttcaagctttttaaacaaaagtctaaggaatcatttaatgaatgttgatattctacatattttaatactgaagtgtgacatgatttttccctgagtactgttaagtttagcctgaagctcccaccttatgtattttaaacttggcctaaaagtttctctgtacacagtaaactgtaacctaactggttgtgtaaacagactgcaacctactcttgtgctaatcactgaggttcagccaattaaaggcaaccagttgttcaacctgtgttcaagtaaggctgaccctgagctgtaactgacccgtctgtttctgtacctcacttccgttttctgtgtgtcaccttcctttttctgtccgtaaataattttcgactatgcaccagcaccagtgtctttgaacctattcttgttccaggactgcccaattcttgaatccgtctttgctcagttaaactccgttaaatttaattgtctaaggtttttctttcgtaatactatcttgaattagtcacacgttcactgatctaacaaagaaagaatgtaaattagaaaattaagtagtatcagggacatatagtatttatataattctaaatacacggtaatgtctaatattatgtagcttgtgtgtttttcatccaattttaaacatcaggtctttagactttgattcctttcattttcaaatttctaatgaaatgattttggtaattggtaattatttttttgtaccagagaaagaaaatgtacaaataaactttcaggaatgtaattaactatataacatcaaaggagaatcagtgcattaaaaagccaaatttttggctgttcctatttatacatgtggcttaaagatctttataaaataaagatggatatttattctaaaagggtacataggggtgtatgtgttaaatagccacattttagtttgtttgaatcaagactcaaatggaattgtaaagggacagaatcttattaaaaacaacatgaaaatgacttgccggccattgatttgtacagcttggatggcaagtgttaaaataatggttatctagaaattgtagaaccctattttatgatactattatgtaagagagtgttggcaagttatttaatggagcaggtttaagtcatgtgagacttacaaatatttgcatagaaactgaatcccagtggtggcatgtggaaataattttttaaaggatatgcttaggctatttaaaagttatttagtatcagatttcagatcccattttagagctgacgtgaatttgaaaacatgccaagctttatgttatagtctacattacaactttagtctcaatggaatctaaatactgccttgtgagttctgtgaaaaaatttaatatagcataacagacagaaatgattgtcttgtactttctgaaataagtgatactgcttcttcctccacattagtgaaaaaagactgaggaaggggcttttataagcaaaaccatttatacatttgaacactctaggagttgtcattttaaaattagttctcaaataatgagatacaactgtttattatataatcaaaacactacatgaaaacaggaaaactgttaaaatagtactataactgttacttgtatttgattattataaactcctgggaaaatgggataaatactgtattaaaaagaagatatcttcccactcagtaccaaaaacttccagatgtaagtaaaaatttaagtgtaaaacataaaaccataaaagtagtataaaaaatacgtgaagtaaatatagaatattagaatgattcccatttctagcaggtacctaaaacaataaataaaaagacttcatttaattacataaaaatccatagggtttttatataagagaataaaatttgaaagcaaactaaaagagaagtttgaaatatatatgacaaatgcctaatactctgattatatgatgagtacttataaataaaaaatttgtagttcatagaagaaatacaaatagctcaaaatttataaatgattcaatcttaagagcaaaaaagaaaaaaaaagatgagatctttttattcatcaaattggcaactatggccgggcacaatggctcacacctataatcttagcacttttggaggccgaggcgggaggattgcatgagcttaggagtttgagatcaacctgggcagcatagactttgtacaacaacaacaacaataacaacactcaagatatggtgcaaatactgtaagaagctcagaaatggacagtttgacattatgtattcacatattcacattgtatcctttgaagcagcatctctacttacaataatttatctgttggaataatagagaatgtgaataacgatttagttacaaagaagttcactagtgtgctatttgtaatagcatactgttggaagctatctgatttttcaataattaaggtgatgagattgcagtgttttttttttactgcttttatgtgagctatatcatttcaagataatgtaaatagaaaataaaaaaaaacctcagttgagctcatagtaaatactactaaatatttactctctgctccagttttctgattgataaattgtggataataatagtacttactcatagggatgttgggacaactgagttagtatatgaaaagcacttagaaggccaggctctgtggctcatgcctgtaatcctagcactttgggaggccaaagtgcgtgaatcacttgagcccaggagtttgagaccagcctgggcagcatggcaaaaccctgtccctactgaaaaatacaaaaattagctgggtgtggtggcacatgcctgtagtcctagctgctggggaggctaagttgggggattgctcgagcccagcaggttgaggctgcaatgagccatgatcacgtcactgcactccagcctgggcaacagggtgagaccctatttcaaaaaaaaaaaaaaaagcacttacaatagtggttggcatgtaatgagtgctaactgatgtttgctggtattaattcacaaaatgtccctgaaatataacatagaaaatcatggtttgttgtgtgtatgttacagatacatatataaaagaggccgagtgtggtggctcacactggtaatcccagcactttgggaggctgaggcaggtgaatcagttgaggccaggagttcaagaccaacctggccaacgtggtgaaaccctgtctctactgaaaaaacaaaacccacaaaaattagccaggcgtggtggtgcacgcctgtaatcccaactacttggtaggctgaggcaggagaattgcttaaacccaggaggcagaggttgcagtgagctgagattgcgccgctgctctccagcctgggcaacagagcaaggccttgtctcaaaaaaaaaaatttttttttaattttaaagtatgtgtatatatatatatgaatatgatatgtggttaatttggaatatgaaaattacctgactttaagaaactggcctacttgaaagtaagtgatcaaaggatcgccttataaaaagatactctaaatttgtctggaaattttgtccctgctacaaacacatgttaaatgctgacctgaagctgattttgatattaaacagaatctttcttggtttcttttgaacaggttggctcaaagctaatctcttgtcacaagctggtattggcttgtgttattccctactttagagccatgtttctttctgaaatggctgaagccaagcaaacgctgattgagattagagattttgatggtgatgcaatagaagacttggtaaagtttgtctattcttcacggctcactttgactgttgacaatgtccagcctctcttatatgcagcctgtattctgcaggttgaactggtggctagagcttgttgtgaatacatgaagttacattttcatccctccaattgcctggcagtaagagcctttgcagaaagtcacaatcgaatagacttaatggacatggcggatcagtatgcctgtgaccattttactgaagtagtggagtgtgaagactttgtaagtgtatcaccgcagcacctccataagcttttgtcctccagtgatctaaatattgaaaatgaaaagcaggtctataatgctgccatcaagtggcttcttgccaatcctcagcatcattccaaatggttggatgaaacacttgcacaggtaggagctgaaataagatttcacacagaaatgaagtgatatggaagcaaatcaacatgcttcatttattaggaaaagtgtagattatttcaaggaatatagaaattattgatgtaataaataatagaaatggcttttagctctctaattttcctgttaacttgctgtgctgtttcaggatgaatctaaatttgtcacatttgaattagcaatatcattctctgcttttaacctgaatatttaaaatattcctttgggatactaatgatgaatattttatttatgccaatagaaaatggtttgaagaaatagctctaaattaatatactttataattattgttttataatggtttctaaattttaatgaattattttgctaataaaagtatagttattcctaatgtggatagatttattatgtaaacaaccataggacatcacttctattttcttctctcaccgtagtttgactttttttaaacctcagaaatgtgtctcattgttactgttcttattttttactgtcaataggagttaccaggataagaagattataggcccttgtgatctttttttcttttgtcgtcttcctctcctttctctcccttccctccttcccttcctccattttttcctttcttcatttattcctgagaagtaaaatgacattttgctacttaaaagaagagtgttcttatttacttattttttctaaattaaatgctttgttaaaacttagtgcttgataaaagcactcagtgataattctcgtgatttttaataacaaagtttcctaatagcattatcagaaacttaaacaaatagtaagaagaatgaagaagaatgaaagtgcttataattaccagtgttctcattttagatatttataggcagatgaagtaaacctattcagagtatgatgataagacattttttcaagtgcatatcacaatatttatgcattcatatgagtatcaaagttcagaacacatttacatcttctcagaattattttgaaagtaagtttgtcagcaaagcaaatagaaagtttcattatcttgcagctatatcttatttgtgtatatgtgtttttctttaagatggtaaggcagatttcgttcaaggggggccataacaatagatacagggactgctgcaacgaagtcttgcagttggggagagagactggactcaaccccttacgtgtgtgtgtgcttttaactcaaaatagcattacctggtttcatcatcccctttaatccactggaaaatcagtgtatctttaatagaggaatggtgaatgcctctgttgaaagaggggatgcatccctaagttagtatattcccttccaagatcattaatttgaagaaaacaacacttgtttcagatatgaatttttacatttttaagtaagaaatcacatttccctatgtttaatcttagcttaaaaaggcaaaagaacaaagcacagcacttttgttttgattgtgcctttatcaatagaagggccttgtgattatgtcagtaccgtttttggaagtaagcaatttgaatgaagacaattcaattataaagcctatttaaaccgatatttaaagtgggtggatataatttaacgtgtagtctgattgcatttgagcagaccagtactggaaattgcttataatttggcacattgaaaatcatgaacatgttacatttcatgaagtaacaacttaagttttaaaaagagaacatgctgcagtagaagtggagaattactcatcttgttttcacctttatttgatacaatttttagactttatattttcccaagaaaatataaaatttgttgtattgcaactattcatgatcttaggttcgcctgccattgttgccggttgattttcttatgggtgttgtggcaaaagaacagattgtcaagcaaaatctaaaatgtagagatttactggatgaagcaagaaattaccaccttcacttgagtagcagagcagtacctgactttgaatactccattcggactaccccaaggaagcatactgctggtaaccaaattattttgtcaattctcctggaaggatctttgttgtatttgagggttgttcatgtgtgcccaaacttagttgtaatataattagtgtctgattgccttaaagtaataattggcaaatacggttttatatatttataatttttactgtacattatttagttttaccaataagccagttttttaaaaagccgtaatcagtcctgtatactctgaagagcctactgaaatatctcttcttttgagatctttcccgattctgaacttggtttactatgttgcattgtcatttactcatttgacatgtcttaagttcttcaaagacagctgagtatcttatttaggtttctatccctagggccaagcatggaacttgaaatatattgtgcatctaaatatttgttttttcattttaccaaataaaaagggcactaaacatagctaacatttgtataatgggttatattaaactcttagagtctaaagcccttatattttaggaggcaggcagtttcacctttatttgatacaatttttagactttataatttttcccaagaaaatagttcatgttcgcttctttttttttgagacattatgctataagaagtatcactttttaataaaatatttataaagcgtaacatatttgagacatgagtgaatacatgaggttcagaaatttaggaagaggagctctaaatagagacttcctctatatatggtgcaatctaaatatgcagttatcaaataatgaggtctttgatagcctgaaaacaacaacaaaaggcaatacctgattatgagtagaatgagattttatctaggtaatacaaagaaatgctgaaagtcatacacctacctatgaagaagtagttcttctagataattagtttaacatgaaactaattatcctcattttttataggttgatgtaagtaagtaatttttttttttttttttttttttgagacggagtctctgtcgcccaggttggagtgcagtggcgcgatctcggctggctcactgcaagctccacctcccaggttcacgccattcttctgcctcagcctcctgagtagctgggactacaggcgcccacaaccatgcccagctaatttttttgtatttttagtagagacggggtttcaccgtgttagccaggatggtctcaatctcctgacctcgtgatctgcctgccttggcctcccgaagtgctgggattacaggcgtgagtcatcgcgcccggcccaagaattgattttttttagttgtatagcttttttgttgtgaatttagaaagtcagtgtatttgatggaattcttcaaactcagaattgaattcaaataacatcttagcagcctaggttatatgccaaaatatactagacagtcatataaatgatctacatgactgaaggaactttatgtagtaggttttagataaggatttgatcctcattttgaaataggtcgttttattctgttttaaggatgaggagactaagaattaagttaaaaatatgccgaaggtcacacatagaaatagtagagaaagggtatgcatcctggtcttttacttctattttagtttttttttttttccttccatacgatgttcctatgtgaactatatagatgaaatactagtttctacttaaagaaaatctaatcaaagattaacattgcattctgggattataatcctagctgtgccattgaacatctgtaattttgggcaaatttattaatcagggtctcagtttacttataaacagatttctttttttttgagactgagtctcgctctgtcacccaggctggggagcagtggcgctttctcagctcaccatgcctcccaggttcaagccattcttgtgtgccccaccacgccgggcaaattttttttttttctttttttttttgtatttttactagaggcagggtttcaccatgttggctaggctggtctcgaactcctgacctcaagtaatccacccacctcaacctcccaaagtgctggattacaggtatgagccactgcgcccagcccagcttataaacaaatttcttaatcaaggcctctgtttacttataaacaatttgactaaatgatcttcacagtttcttccaacttttttttttattaaaaaaatttttttgagacaggatcttgctctgtcatccaggctggaatgcaatggtgcaatcacagctcactgtgccttgaacctcatgggctcgagcagtcctcctccctcagccccctgagtagctggaatcataggcacatacccagatatatttttttcttttttgtagggattgggtctcactatattgcccatgctggtctcaaatgcctgggctcaagtgattcacccacttcagcctcccaaagtgctgggattatgggtgtgagccaccataatttgctgctcttccgactttaaatttatctgacttaaaatattgaattagttgaaaaagatagcacaagcagctaccaggcattcatttatgcagtcattcagcaaacctttattaagtgcctaccatgtgaaaggctctgggttaaacataagaaatgcaggcacatacagaatacagccggacttattttggaataacttgtctggtctaggaaaatagacatttgaataaatgcagtaaagtcttaacaggtacttttatatcttcataaggtataatgggacttacaaagaaaacagtagttattttttatcttggaagagtcagaaaaggttttgtagagaaagtaaaccttagccttggttgtgaataataaataaatgttcttctgaatgctagttagggtaagggtgttcagttcattttacaattattgaatgcctagtacatggcaggtactgtgctagtccttgttaatgcataattgcttaatacacagtcttaacctaccttagactctggtaacagatgttggcataacagatcattttaatactgtgtgttaaataaatgctaattaccaaaagtgctataggaacaccaaagatgtgtactatatgcatagttgcaggagcatgaagtttaagagagagaaagaggggaggagattgggttagatcctggaagacctttatgctgtgataaggttttaccttgtaaggtagcctttgctgctcaaagtatgaaggaagtggtcacccctcgaccagcagcatcagccttcacttgggaacttgtaagaaatgcaaattcttggacttatcccaaacctactgaatcagaaactctggaagtcaggcccagcaatctgtgttttatgccctccagctgattctgaattacactacactgtttttttttttaattgtggtaaaatatatataacaaaatttgccattttaagcattttttgtcttatttatttttagagacagggtctcactccatcactcaggctggagtgcagtggtgcaatcatagctcactgcggcattgaaatcatgggctcaagtgatcctcctgcctcagcctcccatgtagttggcactacaggcatgccccaccacagctggctaattttaaattttttttgtagagataggggtcttgttctgttgcccaggctggtttccacctcctggcctcaaatgattctcctgcctcagcctcccaaaatgctgggattacaggcatgagccactgcacctgcccattttaaccatttttaagtgtacaattcagtggcattcactaaagtttttgagaagtactggtgtaggtaatggaaggctatcaaaagagccttttcattagtttactgtgttgacaatctgaaagcaaaaagacagctaagtgttaagagaggacaggattttgcagtagttaagtagtaggtgatgagggcatgaactgttcccagtggtattgggaatagagaggaacagataggacaccacagggaaggaagaggttgtttaggtaggcaagaaggggagatccttttgaacttgttgggtttgaggtgtctgtgggacatcaagtggagatgtggcttagaaatgtatataggaaggtgttatgatatagatggaatctaaaacaaagggatgaacttttcctgtgtgagcaaaaaatatgtgagaaatgggctaaggatggaacatggaaaacatagaaggaaatagatgattggagacaaaaggagactgatatagaaatcaaggaagtaagatgtttcccaaaaaatgggatgatcagcatatcaaatgttgcaattgtgttcaataagaaattaacttagaggctgattggttttgttacgaccttaggaagagtaattttagaaggtaggtgagagtataaaccatattgtagtgggacattagcaagcagagatagttgatataccctattctttgaggggacaagaagaaaattttattagatttctagtaacataataacattgaatactatccaaataacttttttttgtctttttgcttttatccaaagttttggctttctaatttttttcaacttggcagctatgatttatctctattttgtggctttacctttaggtgtgctgttttgtgtaggtggtcgaggtggatctggtgacccctttcgcagtattgaatgctattctatcaacaaaaacagttggttctttggaccagaaatgaatagtcgaaggcgacatgtgggtgtaatctctgtggaaggtgggtccactcttgtctgaaatatcatatgatcacaatgctctttttaaaatatttcaactctgagaatttatttttatataagaaaatgactaaattgtaaattatttttaaataaaatgcttggttagtgataatttacttgctttgtgcccacagatgctcagtgtgcataatgtggagatgaatatcagagaaaagagatataaagagttaaactattctgagttatagttaccaaaaaactaaaccaaggaaaaatgtttatagaactcaaattataattacatatcagcttttttatgcccatctaattaaaattaatgattattagtacaattaatttttttttacttattcctgaaaatgaattaattttagaaccatggataaattgtcagaaaactctaaaagatcacttttttattataaaagtataaatgaatttttaacaatataaaaacattttcataaaaaatgaaaaccacttgcaacacaaacacccagaagtagtcacagttgacattttggtgtacaatcttgcctatctttctctgtgtgtttttgtttgttttattgaggaaaaaaattgatcatattaacagttttatggagattgaggtgggaggatcatttgagcctgggagttcaagaccagcctgggcaacgtaggaagatcttgtctctacaaaaatttaaaaatttagccagacatagtggtgcacgcctgtggtctcagctacttgggaggctgaggtggaaggatcacttgagcctaggagtttgaggctgcattgagcagtcataacgccactgcactccagcttgggtgacagagcaagaccctgtctcaaaaagaaaagccaaacaacaaaccagttttatatgtatgtgtgtaagtgtgtgtgtgtgtgtgcacagtttatatatatatatatagtttttgtttgtttgtttgtttgtgttttttttgagatgaagtttcgctcttgttgcccaggctagaaggcagtggtgcgacctcagctcactataacctccgcttcccaggttcaggcaattctgcctcggcctcccaagtagctgggattacaggtgtccaccaccacacccgggtaatattttgtatttttagtagagatgggctttcaccatgttggtcttgatctcctgacctcaggtgatccgcccacctcagccttccaaagtgctgggattacaggcatgatccaccatgcccagccaccagttttatattttcaaatataacctaataagagcatttttccattttattaagcattctctgaaggcatgattagtgatttcatctaccaagtaataaaaagttgggaagcctaagggggggcgataatattagagcatttactaataaataacttcatgtagaacagcatgtttagtgcaagcttacattgatttttcattcaactactgaaatgacattgatcataatgttgaacagaacagcaattattgaaaattaacttatggtgatattttaattatataatgtttatatatgtaacattaatgatatgaatttatttgtttggagtcaaatgaaaatacttctctatttgacaggtaaagtgtatgcagtaggtggacatgatggaaatgaacatttagggagtatggagatgtttgatcctctcactaataaatggatgatgaaggcatcaatgaacacaaagaggtagatcagcatggaaagttattttgaactgatggtggaaataaagtttcttaaaatttaaaggccttattttaaacttttttttctactttagaaactttaaataccttctcaaacacattttgttagcatgtccaaagtgatactttgttaacaccttttattttttttaagaattaaaaatgcagtcatgttttagagtaccatatggtagtcacagttttcacttatacatgagcattgatttttttaaacattttattttgagataattttagtttattcagagaagttgcaaaaatattaaagtttctgtgtaccagtggttctcaactgaggatgattttgtcccctctatgggacacttggcagtgtctgaagacatttttggttgtcacagcttggggatgggaaaattgctgctagcatctatgggaagaagtcagaaatgatgctaaagattctataatgcacagcaaagaatcttctagtccaaatgccagtggcaaagataatcccaagtgccagtggcaaagataatgccaaatgccagtgctgagatggcaaaaccttgccacctaccctgcacctggcttcccataatgttaacatgttacacagccatagcagttactgaaattagcattgaacagtagtattaattaatctgtagactttttgagtcaattttcccaaacatccttatgcttcttactgatttttcttgtctaattgtattgcctaataatctaatacaggtgaataatggcagagatagtaggtgtttttgtcttgttcctgatcttattagaaaagtatctagtgttttgctattaaataagatactgactttaggactaaggtatctatatttttatcatgttaagaaaatagtcctcaatttctcttttcttcattgatttttatcctgatgaacagtaatattttaagttctcacctacatatttatgttctcatttacatatttatgttctaatatttatattctcatcaacataaactggaatatatgctgattaatgtatcagtctaaagggaagatttttagtaacatacttagtactctaacctgtttgacactttcattaatgacttgaataccagctttttagatatcctaaggtggaaagatcactaaggcatgtgaccaaatcaggattccaaagacggagtagaccacatatactctagacaaaaacctaaaaaatgttaaaattagagttataggttaaaacctgccttaggtattttaaaaactcaatcccacgagtacaacataacatggtgggaaatcaggtttttgattgtttcatatggagaaaagtacctgaaccattatgaaacacagctcttaaaaaaaaggaaaggaaaaaagtgaatataatacagttgcctacattaaaagaagtgaagccttagattaagggagttatagttgtattgttcttgacactgatctctccgtatctatagatgtattgttgaagtagggtatataacaccagttggggtatgggaataaaagattagactctctgtacatttttaaaaatttattttgggtggatgttttataatgaacataacttgttagtacagtaacatgtttataatttgaaaataagatctatagaaaatgcacaaaaatggattgtaataaatgtgagaatgataatctggaatgcatgtaagaaaaaactagcaggttagtaatacaactgaaaaccatgttatctacaaaaaatagttgaagcgttgtgatctggagacaagaaaacttacaggagttactagatattttaagagtgtatgttgatttagtaggaaggaataaatatttgtttatgattcagtatagtagcaatgaagcatactgtaattcctcctagtgattggaattgtattgtcagaaagatcacatatattttgcaccaaatgggagattaaattttattgcctattttttttcaactttattgttctgttaatagcgtgaggatttcaaagactgagcttaataatttgtataaaactagatactagaataattctgtctctgtgtcagagtgaaaatataatgcgagaagagagaagagggctatcttagtaaatattgaaaatattgctgaagagtttcttttaataaaactgcaggtgggccgggcatggtggctcatgcctgtaatcccagcactttgggaggccaagatgggcggatcacctgaggtcaggagtttgagaccagcctggccaacatggcaaaacaccgtctctactaaaaatacaaaaattagctgggcgtggtggcgggtgcctgtaatcccagctgctgcggaggctaaggcatgagaatcgcttgaacccaggaagtggaggttgcagtgagccgagattgcgccattgcactccagtctggatgacaagagcaaaattccgtctcaaaaaaaaaaaacttgcaggtgatatatatatatacacacacacatacacacatatatatgatatataatgatactgaccttaatatatataaatgtatcacccacagtttaattaaaagaaacaaacctgaactagtaaaaccatacctgagacattgtggcttatatggttggcaaattagcaccattctgcaaaaatgacttgttatcaaaatgagcaattaaaaactaaaccacacatggggatatgttgcctctaattttctatttttgattaataatattttcaactggtttttgcttcttgtgttaaaatatgaaagattaaaaaaaaatgtgaagacattttaagctttttttcccctcatgaaaaagaatcctagaaaaaaaaaaagctagtcttaaactgttatctcccactgtctacaaatgacattttaatactttaatagggagtgatttacactatgtgataactgcatggattaaaatgggagataaaatcccaaagtacttttttaatctttatatccctgttactatgttggtttttagccaaagattgaatgaaacttctctagcaaaatagcaattgaatttctttaatcttttaaaatatgccccgagcatttacaatctgtgtgaaaaataatagagctacaattattttgtcatattatttgtttataacttatatagccccaaatcatctttttggcatttcaatacattttcacatgtgaaatatctggttatctttatttttttatttcatctttccactgaaatggacaccgatgtttgtttaagctatgagtctgttgaaacccatcatcctgacagcatgtctaaaggttcacttatttattcaaaaaaaagttttaaatgcccaccacaagacacaccaagtggtaaagatacaactttgttttttgctaccagcagtagaaaacatagccagtgtctctgcctctgtatagcttacattgtagaagagaagataacaaataatgacataagggcaataatattagcatggggtgagtaaagggtgcttgaggagtggagaacatcttaatgaagtcccatttattatgatctgaaggaactgcagaatttagcctgattaagttattataggtggggtaagagtggtaagtggagggagatgaagagccttcaaaaaccaggcgatgaaagagagcaaagagcatgaaagtggtccaatgtagttggaagattaaggggaagagtgtctagaaatgaggcagaaagagtaagtaaaggttgaaggcctttcaagtttgccaaggatattttatctgatgggctttgaattaaacatatatatttaatatgcatgtatagtaaatatacattttatatttttatttaaataataggggaattgtaggatcagatttctcttttcagagaacttctgcattcaaaatggagaagggatttgaggatgaccagagtgaaaacagtctgacagaccaaaaagggttattgtaattcttcatcccttgatgtaaagaaataatggtggcttagactatactgatagaaattgagatagagaaaagaggacatatttgaaagatagttcagaggtgtatggtcaaaaacactttatgataattagaaagaacagttaggtagaggcaaagatgattcttcggtttctgccttaagcaactggatggataatggtatgatttctgaattaggaaaacaacatggtgaatgggataaaatttttgtttgttttgtgatggggttgtattaattttctatgtccatgtaacaaattgcccccaatttagcagcttaaaatagcacccatttattagctcacagttcaaaagtcatgcaggttttgctaggctttctacttagggtcccacaaggccagaatcaagagattgggctaggcttttgtctggaggcactggggaagaagccacttccagggccatttaggttattgatagaattcagttccttgtggctataggactgtttctcatttttattggctgttggctacaagtcactgccagatccttcccacatgttcccccccaccttcaaacaagcaatggcacactgcattcacttggttttttgaatttctgacaatcagctggagaaacctctctgcttttgaaggtttgtttgattagattaggcccgccaaggtcacctcccttttgccatataatgtagcatagtcatgagagtaacaccaggggatgaaggtcatgggggatgaggagtatcttaaaattctgcctaccacagcgaggtgggcagtgagtttcatttcagattaaagttaaggttgaagagccagcaagacatatttgaggtagaaattgggtatatgtctgaaaatatatatttgaattatcacaaatctgtggaaagaatgggatatgcttagggagagaaagtgtagagtgacccttagggaactttataatttaatgatggagtaaagaaggcactgatgaagctgaaaagcactagccagagacgtaggagtggactaaaacgtatgatgttatgaaaaccaagagagttttgaggagtaggaaataagccaatgatgttgtctgcttttgtcctttaaggggagggacaattatgaggcatacttactttatttccctgacctaacatcgttacattctagagaacacatgtacttgttctcacacacctgaacatttttatcagcacagtatttggtaagtcatagctttatacccaagagaaaagaggttgaggagcttgaaagtgaatgataacattatccttaagaattcttttgttggatactctctggtaaatttagagttagaatctcagtgaagcagctgctttctccaataataataaaagctaatacttcatagaactaaatatgggccagacattgttcttagtgctttacatgtattaactcattaatatccatctatgtctcagatgagacacaagatagtagaggtttataaattatccaagctagtgacaaaataatagtttgataatagttcaacttttgattggtgcagtgtgttttttaagaaattgagttttttttttgatcactgttaaatcagcttttaacatgggctaagtctcttacttttagagagaaataaatacgcttcagaaataaagcaacgtgacataaaacttgtaatataaaatttaatactcttttgtgtggtataatgaaaccctgcaacaaaatgagctctgtaattgcatggatttgtaagtgagattggcttctgacctccgctgcagaacttctctgtcaactcattaacctctcagttatgccgctgtgtgtgcactaattgaatattttgaactcttttatactattttgttgggttatattttattgttttgagtttaaagtagcctgtgtaggctatgcactgtacaacttcagggggcagtattcacatagagttgcacagtttggcaattctgtagccatctagtcaaaagctttgatagatctaaaaataatggaaacaaactatactgtttgaaggttaacatgataaatgatttgcattagcacaattttttatatgactttttttcctggaaacaaactcatttgctaaagtatgttttattgtctttgcaggcgaggaattgccttggcttccttaggaggcccaatttatgcaattggagggttagatgacaatacttgcttcaatgatgtggagagatatgacatagaatctgatcagtggagtacagtggcaccaatgaatactccccgtggaggagttggctctgttgctctagtagtaagttatatggcaacttgtcattaaattacattgcattacattcataaccaaaataaggaaaggtccaatatatcatcaccagtatgaagatattatatatcatattatttcctgaaatactgccttgtacattctaatttaccattaaaacaatatataaataaattcgaaatctaatgtgttttgtttgactctcttcatttagaaccatgtttatgcagtaggtggcaatgatggaatggcttctttatctagcgtggagagatatgatccacatctggataagtggatagaagttaaagaaatgggtcagcgaagagcaggcaatggagttagcaagcttcatggttgcttatacgtagttggtgagtaaatgggtatttctctaatatatcagtatatacaatgacaagtgtcatataacagagtaacaaaaattacattgcatttagccttaagtagaatcggtcctgaaatgtgcttttgaattctttcttacaaaattttgtttataattaacagagaattgtacatgttcagtctgatgcttttgaattctttgtttttttttttttcagagggagacagtgtctttctgttgcccaggctgaagtgcggtggcacaatcgtagctcactgcagccttgaactcctgggctcacatgatcctcctgcctcaagcctctcaagtagctaggactagaggcccaggctatcacacccagccagtttttttctgttttttgtagagatgggttcttgctgtgttgcccaggctggtcatgaacaactggccttaggtgatcctcctgccttgccctcccagagtgctgggattacaggcatgggccatcatgcctagctgaattgttaaggtcacattcataatttttgtttaaatcttcatctttcatgtttaaaacatgtacagccttatttttctaagagtaacaaatttatttaaagaaggggattacatttaaataaggtatatgtttttaaatggaaggacacagattgaatgtgctttgctacaataaattttaaaaggtctcagatttgtttttctcaacctcatttcaagggaaattatgttgaatacttcaagtaagccagtaggtatttatttatttatttttgagatagagttttgctctgtcacccaggctggagtgcagtggtatgatctcagctcactgcaacctctgccacacatgttcaagcaattctcctgcctcagccttctgagtaactgggattacaggtgtgtgctaccgtgcccagctaatttttgtatttttagtaaagacagggtttcatcgtgtttgccaggctgatcttgaactcctgacctcaagtgatcttcctgccttggcctcccaaagtgctgggattacaggcatgagccaccacacctggcctaggtatttcatataaataaaggtcatgtcaatgtttatattgcttttttttttttttttactttaacaatcttttattaccaaaccccatgcaggtttaacgctttaacccacctaacagcaaaaaaaggcattgctaacaagatcaaggatgaaggtacagacccaataaagattgtgtcttaaaaaagaaggatatatatatatgtgtgtgtatatatatgtgtgtatatatacgtatatatatacacatatatatacacacacatatatacacgtatatatacacacatatatatacgtatatatatacacatatatatacgtatatatatacacacatatatacacacatatatatacatatatatatcttttaaaaaataaaaatctccagtgttgcagaaaaaaatattataaattgatttcagtccataaaaaacagcatgcagcagtttgtgctatcttaaaaaccccaactcaggataaccctaggagaaaatcacctccccccattaaagaagaattctcttttctattctttcttgtctaaatttcactgcttattccacaaaacgccgaaagaataacaagactcagttcacatccctcagcccttgtctgtctgttaaggccaacaccaagcgctgttccttaggagtcttcacctttactacaatcagaaaattgagccctaatttcacggccagatttctagaaacctgcaaaaccctcatagttccctcaaggaaggacctgaaggccccttgaaagatcaagggagtataagtgtacttggcagagactggaatgcctgccaggctgggaaaagggggcctttctacacaaaaacaccccctaaaataccttgtagttgaaagtctaactaggcaaaaccaagtaacagcaggcatcaaactatggttctacctaaagggtatatatcttccccctttaaccataaaggtaaggcggggggcggggtgtggggtaaagagagccaagtgagcatttgacttcatctgtcttctgagaagttagcatattttaggctgaagccatgttgtagagacatttggccaaaggatagtctttgctatgtgtggctatataaagctgccatttctgggcaacctggttcatggctgctttatggaagctttaccccttatgcagagtatttaagaattaataggaaatttttcagtttgattttgtaagtgacaaatactttaacaacagcttcccaataaccaccaatggagacagactactcctcagctcaggatcatagctccttccagtcagtgggcttcttgctagacatctgcaggagctcattggtcttagaaaattgtctacatccaaagaaccctctgtacacgggaaggaatgagccatctgcagcacatggtgctgcttcctgtggatggcactgcccttcttcttagcataacagccccagagcagaaagacaaggccattcgagttctgatttagccaggacacaaccgcattggtaaattgctcccagcctcctctttccttatgaaaattggcttgatggggcagaacagtgaggacagcctggagtaggagaacaccttatttggcccacccagataaatctccatgaccaggatgaataaaaccatatctgtagatggctctttataaatgttttccaaaccaggcagaggtggaacaggtctttgaacactaaagcagcccatgaacttgattcggtctctaatatgggtcctgtcctgggatgacaaccttcacatctcttatgtcacacatctgggtccaggtgaagacttagtgtgggggtggataaacagtgtaatgtttcctttcttctgcgacaaatccttttatcttgataaaataacgtttcccgaattccattgaggtgcttcttccaactctcaccaaagcccatggacatgttacaggccatgagtcttgagtagggccacagcctcgttgctctggatactgaccaactgcccagcagcaagaagggcagcgtcttgggcttgtcttatctggccggggccttcttggcaggagcggcccccgcatcctcactctcctcaccatggctgccctgctggtccccaggtcatccggctcagggctgcaggcacgttgcttcctggtggggctgtgggaacgaatgcacaccacttggggactgcaaggcttgccctggctgtagtgttcagtaattgatctatattgctttttgacttactgaattgcagagttgggaggaacattagatcagtgatttctcagaccataatgtgcatatgaataatctggagatcttgttatattgcaaaggaggggcctagtttctgtgtttcaaacagttctcaagttatagtgatgcagtttcaggttcacacaacacacttccagtagcaaggctttaaatgattatgaaacgggaataatgtctatctttcagaatcattttaagaataagagataatacatgttaagcatctcaaagtgtttccggcactttgtagttccccagtacatgattagctatattgtgattagtaataccttcctttatagaggaggaaatgaattcagagaggttgtcactagcaaaggtcacatttgcttatatatgttgatgtaaattgtttgtgttacttaacatatttcttatagatatttatatgctaacaatacagcattctcttataagtagcagaagtaatgctgaatctttcagtgctcatgtgtattaaagaagaggggaagtaacataatttacctctacatcttgcctgattatcacaacagctctgtaatgtagtcaagagactcagagagaatgaataatttactcatgttcacatgcataaataagtggcaaagctggaatttgaacttggatctgtgaatccaaagttcttatgttacatcattgctacctctcacagctccctgtctaccacaggcattgacatgtgttatatgtcgacaggaataacattgttgctgttactttttaaatcttttggacccttataattagaatagacatggtaaaaataagaatgattcaggttgaacattaaaaaaatcttcttggtcattcaggttctacttaaaacaggtacaactgatttgaataagaaaaaattgaaggtgtgggcatgtctaacatcctaattgcattttgctttttctatccctggtttgaattctttgttataatacatttttatgcattatctggggaaatgatagggaactagtgaaaaagaagactatggaaaatatagctatcaaaaacttggccaggtgcagggattacccctgtaatcccagcactttgggaggctgaggcaggaggatcacttgaggccaggagttcaaaaccagactgagcaacatagttgagacctcatctctatttaaaaaaaaaaaaaattagccaggagtggtggcatatgcctatagttccagctacttaggaggctgaggtgggaggatcgcttgagcccaggaggttgagagtgcagtgagctgtgattgtgttactgcacttcagtctgggcaacagtcagaccctgtctcaaaacaaaacaaaacaaaaatttaaaaaaacccttaatctacattagcatgagcaataattaaaaccaaaccctttattataatgaaaaaatgttttatataatggttgtaatggtaatgacactatacatttgtcagaattcatggaaagaatgcagataaaattggtgaatttcattttaattgatttaataaaattaaacccattagagaggttgacttgaatttttttttctgaccttttttttttttttttttttttttgagacagagtcttgctctgtcgcccaggctggagtgcagtggcacaatctcggctcactgcaagcgtccgcctcccaggttcacgccattgtcctgcctcagcctcccgagtagctgggactacaggcgcccgccaccatgcccagctaatttttttgtatttttagtagagacggggtttcaccgtgttagccaggatggtctcgatctcctgacctcgtgatcggccccccttggcctcccaaagtgctgggattacaggcgtgagccaccgcgcccggcctctgaccttgtttttatatagattgatcataatatcaatactttctattctcagtaaattaggctgtcaccaaagaaagctattatattcatttagacttggagctcaaaaagagacacttgtttttaaaggaaggagcactgttgaaataacagtctctataacctcaggaacagattaagtacattgctagaatgagctatagaaaggactgctatcttctggaatatgtaggaggaaaatgttgttatgacaaaaattggtgagaattcagtcatagtccaccatttctgtaattatgatggcgattatagtattaagggaaacaattggaaaactttaacttttatctggatgaatcatgattcagtttattcctttcttatgccttcttactgtttaagatataatacacagagaaggaatctcagtactgtcttgcttgtctctagacggctaaggacaaatttatgaatgtttgtgttttttttttctttttctctgaattatctgcttagatacagggactccatttttttcctacttacaagatctttaatcctagtattgaggaaaatgtcacttacctaacgtggaattgtagacaacatctaatggtagttgttggtggtggtagacaggtattgggatgaattttttaaaaaaattttctctaaaccattctaaaatgattttaaaagattgggttgtaaaagccattgaattgaaatttagtagttaatttctaaggaatgtaatgctgtttttaaaatatttctttacataggtggttttgatgataattctcctctgagttcagttgagcggtatgacccccgaagcaacaagtgggattatgtggcagcacttactactcccagaggtggagtgggaatcgcaacagtgatgggcaaaatctttgcagttggtggtcataatggcaatgcatacttaaatacagtagaagcgtttgatccagtgctgaataggtaatttacatgttgtctccgtgctttatattatcttctggtataatagtagattacttcagagtgttaaaatgttgctagtcgtagttaatactaagctttgggatatcttatctcccactggaagcttgctgtcctacaaaaccagtctcacatagggaatttttgtctttggttagtattttgagtaaagtaaattatgctttgtaacattttttcttctccgtcttttcaggtgggagcttgttggatctgtgtctcactgcagagctggagcaggagtagctgtgtgttcctgtttaactagccaaattcgagatgtaggtcatggatccaataatgtggttgactgtatgtgatttgagttctggccaccaacaatttagtcatatctgataggtacaaaagaaaaccaagattttgatatgaccacctttcaacactttttactgcaactagagtcttatttaaatgttaactgttgtattgtgactaagtacaacttttggaatgatacctgaagaattattagtaatagagttaaatttgatacttcctgcttttgcaaataatggagtagggaagaagatagtcgaacttaaaatcatacctaccctgaaaaatgcttaaagtagtgccaaaaatcttgaaatctctctctctctctctatttggatgaatcaaaatgtaatttgttgagttttgccttttcttttgcctaaagatgttaacgtcaggcagtgggtttttcctagaggagagattagtacctattcattaacacaaggatacataagagacttgccccttttgaagatcatttctacttggtgctgatgaatttatgcctagctttttttttctaggtggtgatttttcaatttcttttatatttacggaagtagaaaaaatgttctgtctttttgaatgccacttagctgcattttcagaagcttataggctataagaagcctttaatttcagtttgaattgctaggacaccaaaagacctagctgggctaactccatccaaatgattttacagttttattttttcatcttttgcaaaaagtatttgttacataatcaaaaggtgaaccagaggaaatattgaacaaggttttagatctgatgttattctggtgcccaattgagagaccttgagaaagaatgatgcagattacatgactctaatgtgggcagtctgaaaatatctttaactgtcttctttgatcatttgattttggatccaagatttatcatctctctattttgctatttgccaccatcctggtttttctgactgtacagaatcaatctgcatttatttattatcagaaatgaatgcatttttacaaaaacctttttgtagactgtagtttattgattagttcaagcccatcacgaactaattaaacatattgttggtaaaaacagagattgaaattactgtttttatcatatttaaatccctctggtgtatttattgaaatttaattaaaaatatttctacatattgatttgaagccaggatattgatggacctacagatttaacagctcttcaaagttttaactagcattataaaatggcctattcattatatgtatatttttttataaatatttatcaagaacatgaaaatattttattttgtatttgcagtgcagtttggcacctctcttccaggccttcctaagtttttgttagttgtgtcttcgaatttattgtagttcaccgctggtcagtaatctggttcataaggaagctggggcagtgaaaaacacttcgttgatccatccagccctaaagttcattgactaatagctcatgcatcttattaaatgggattctggacttctacaatagtgtggaaagccacatcacaaaaaaagccacatcacaaaaaaaagccagtgcctattgagtatatcaaaccaaaaaagaaaaaaaaaagttttaagaggggtcaggctggcagataaaagtctcttatgaagcagatataaatccagtaagctatttttttctacctatgggcaagttcataagtcattgctggatctgaaccagtgttcttttgtgtaagtacaaccatatttcagtcagtccagaggcagttaaccctgtagcacttactagactggtgacaactggctggatgtggagaataagtgtcaaaacctggcttcaatgtctatttcttatgtctaatggagttcttatattacagtgtttgtttagctatggttactaatatgtttgttatatttattttcggggagaggatcttgttattgtttcctgagattatttaaaatgttttttctttgatgtatttctgtctttcttatatgtaaggagttataagggttattatattttcatttctggtttttactatacaatggttatctaacatactaagttggtaccctacctacccgtaaaatatgaaatactcagaagtaaagtgtgtgggcaatcagaagcatagccttgaaggacctgacagcagtatgaaaagataaataggccaggcatggtggctcacgcctgtgatcccagcactttgggaggccgaggtgggtggaccacctgagatcaggtgttcaagaccagcctgaccaacatggtgaaaccctgtctctactaaaagtacaaaaattagccaggcgtggtggcgcatacctgtaattccagctactcaggaggctgaggcaggagaattgcttgaacccaggaggtggaggttgcaatgagccgaggttgagccatcgcactccagcggtgaaacaagagtgaaactccatctcaaaaaaaaaaaaaaaaaaaagataaaaaagcagaatcaatatgtgcacagttctctttatcaggcaaaaacacgtttattgagacatgaaatgagaatcaggctgaaggaatcatgcagctgaaagatgattatattcatagaaatgaagagatgaaatattcaaagaagatggctactttattgtgagacttaccactttaacctcatatgttaacagcacctaccaaaaaatgatatgagatagagctaaaatactgaaattgcaaatggacaaaataaatcatgaaaatttgtttattatttcttcaataaatatttctaggtgctttgtgattctttcatttagtcattaaagccattgctttactatattgcgttgccactttaaaaacaagttacttgacattgtttttgacagatttcactatatacttatgtaattaattgattatttctaaaatgtttgaataaactttgtactccctctaaggagtattttattcattcttttaattcccaaatgaactttgaacttacagtgctgttgaatgccttggtaaggacttcttgaaattgcataaactattcttgtaaatggtaaacttgagaattttctttgtttcttttttctctatgtcttaaagaatgcctttagaatctaattcatgttgtatcagttaagaatgtttctgtggtttctcgtatcagatgtgtaaagaaattattactgggatgccattggctatgtctctttccccttcatgtaaaattccaagtgtcagtaaaacttctctataatattttcttaaaaccatttataaatttgtgttataatactccagaaaatcaatgtaataagtggtcatatatatcaccaactatggatatcaaaaagttggggtcacatcagtgctatttatttaattaaaatacattgcatatttctattagcacaaa

SEQ ID NO: 4 - DNA, 197120 bp, Homo sapiens
ggcaggggaggaggagactcgggaggagcagagcgcaggctccgccgcggccggggtgctccagccgagcccaaccgagcgggcggaccgacggggagagagaaggcgccagagcgcgcgcgcgcggccccgagcagcagccttgccgccagtggagcagctgccgacgcgcggggccgcggacccagcattcgccggccgggccgggcatgagcgcggaggggccgcggccgccccctgcaccgcccggcgcgccgaggccgtgaccggagcggggggcgcggccgcactagtaccccggagcccatgggcgcgccgagccgggcgcgggggcgctgaacggcggagcgggagcggccggaggagccatggactgcagcctcgtgcggacgctcgtgcacagatacgtgagtgctcccggcgcgggctgggggacccggggaccagacagacgcgggccggccccgcagcccggaccctgtggccggtccagccccggggtcccgggaggtctccgatgtctgggactcggaccgcccccggggacgagcgggatgctggggaggggcctcggagttgacaccctggggcttccgacggggtctaggtgggcacagcgcggggccccagccccgggcggccacctgctccctggccgcggccgcctggcgcccccttcccgcccgcagcgccctgggggtccctcggagaggctggctggggttcgagctgtcccggcggaccgggcgcccggagggagccaacttcgaccccgccggggcccgggtctggggaggaaccttcagatgcggcttccgcgcagccgtgtctgtaagattaagggattgggaggaagcgttacacttctgcagaaaaaggtagcaattgtgtttgttctttaacacccctgggggattcagaagcggagtttggaatctttttattttttaccttaaagtaaccaattagatcagaagtccggggtcttcttgggttcctctggaatttgccccttcagtgataagcaagtgaagagctcaggagggaagactcggaaggggaaaagttgattttgttttacaccagaggaggggaaaccggaatccctggcgttaggtgtaaaaaggggtgtgtggccgggcgcggtggctcacgcctgtaatcccagcacttttggaggccgaggcgggcggatcacgaggtcaggagtttgagaccagccggaccgacatggtgaaaccccgtctctgctaaaaaatacgaaaattagccgggcgtggtggtaggcgcctgggatcccagctactcaggaggctgaggcaggagaatcgcttgaacccgggaggcggtggttgcaatgagccgagatcgagccactgcactccaacctgggtgacagagcgagactctgtatcaaaaaaaaaaaaaaaaaagggtgtgtgtgtgtgtgtgtgtgtgtaggagaggaagaaaactgtcccaagcacagcgtttcctgccactgtcttgcacaagaggcttcattgttccatagaggctggcggtcactggtcaatcacaggttcgagaagtcgcatgcaccgggtttgatactagagagggcagtattatgggaactttgttctttcccggcataggaattacctcaggcagcctttcatatttatgagccttctttaaataggagaccttggccaaagatagataggtttcttttcagtgggggatgccagatcaatgctttcccccggatttatttattaaccaaaaacctcggagagtcaaggagacttgagtgcaccttacatcgtttcctgatctcggggaagccttaggaaggtcagcctgacttacttaagtggagagaactcacccctggtgattctgatgattccgatgctagatcttgaaaggcttggctccaggagccttgtgttactccctcactggtgctcgagcccccagttcaaatcctaatgtgagtggtaaacctgtgtttcactgtggtaacgttatagaagacccaatcacagtgactataggtaacctgcagtgtaagagaaatgctttattgggcggaagcttctgttctcagttgtgtcgctcagaagtgtgggtccctagacaccttattttcctgctttgtttccttcgagcgaaatggaagagggaagggactaacactcactttgcccgcggtgttcccagttcattccgttcccttctaacactcagtgttaaaaaggagggtcacgttgtggggctaatgtgcagcctctttccatagaaatgagagatggatgggccagcccggctcaccctttggagaatccccccttcccagccggtttctgaccccttcatcttgggagggggacagacagacgtccaattttgatgcttgactccctttctccaggccttcagctgttttctgttatatagatctatataagtgtttgcgtagcttgcatttttaattcccctttgctgtattattacgcttatggcatcacattttcttttaatctaagcggtaaatattctttagtgaacttttccagcatatacattattggataacgtctcgggaatacgagttgtgggataatattatttctgtttttctcattccacctgtgttttttgcagtgtattcatctggctacctcacccatatttacacacagagccattcatctctatcattttaagttcatgtctatggtattaaactaatttgactttttccagaaacagtcatgatctgttttcttgtaattgcgttatcgtccactatgtaggactaaattatatttccttttgctacagaaaaaagagtctgggattgaatactcatatttcctcatggtttccttatgtgacttactttattaaaaaggatagataaatagaccctgttccttcttggtgttcacatagtcagaattcctgggacaaagaaagctttccagctccttctgatgtgtgagggtggctaaaagataaagaagtccttggaaaacattgctgtaggcattttattgtggattaaccctggagagatagcagaggcaaatgagtgagagaacagatgaaggttaggccagggtagccaggtactccacactgtgtgttactggtggtttgggtgtttggatggaccggagccatgcagagatactttgtatttgtaaatggtgccgtgtttgtataccatgaggagtgcttgtgcttatggggtagtgtatgctccctggggtgatgtatgtgctctggggggcgtggggaaaagcgtgtgtgccgtggggtagtgtatgtgctgtggggtagtgtatgctccctagggtgatgtatgtgctgtcgggggcgtgaggtggtgtatgctctctggggtgatgtatgagctgtgggtacggggagaggggacggggtggagagtgtgtgtgccgtggggtggtgtatgtgctgtgggagccatggggtagcgtgtgtgccgtggactggcgtatgtgttgtggagtagtgtatgtgctatggggtagcatatgagccatggggtagtgcatgtgccatgaggtagtttgacctccatgacgtaacactttaaaagcacttctaggccaggcgcggtggctcatgcctgtaatcccagcactttgggaggccgaggtgggtggatcgcctgacatcaggagttcaagaccaacctggccaacatggtgaaaccctgtctctactaaaaatacaaaaattagccgggcatggtggcgggtgcctgtaatcccagctactcagaaggctgaggcaggagaattgcttgagcacagaaggcggaggttgcagtgagctgagatcgcaccattgcactccagcctgggcaacaagagcgaaactcgtctcaaaataaataagagtatttttaacagcatggatggagagcgagttccatttcctcttcagagctgtaaggtgagcaacaccgattcaggtagtttaagttccgagaggaaccagggcagcctcagcgggtagcttagatacttttcttagatactctctgggcagtggcctgaatgctgagtgggagcctccctgcccttcttagccatgtggccttgggcaagtggcttaattccttctgcctcagttttctcctctgagggtaagagcagtactcatttcatagctattgtgagggttgaatgaggtaatctgggtggagagccaagaatggggaagctctcagtccgtttgtcatgcctggctgttaacatagctgagtccctgggtagggttggctggggagagagcaaacctatgggctgccagtgctgctgctcagctacctgtgggtcccggcctgctggcgtcgtgggtcacaggagaggtaaaccgggcaccctgacactgagcatggtgtggagctcaggtaggattcagaaagctttacacgctgtggtaaaacagcccttgatctctgtaaggctgagcatcccggcgtgggcaggatgcttccctccctcttcccttccatgcctctatgtagggcatttgatttttcttcagagttctgtgggtcaagaactcagtcttgttatggtcctataatcttctttcaatgattcagcccagatattccttgttagttttgttcttttgcctgtcagagcttctgcttgtttctaccttaccattcttgcttcttaacattctaagatagaaaacattgaaggatctgaaggatttccttgctgacagtagataattactttcaacacaaactgttataagtttttttctaagagaaaaataaacatttttgcttcccgagaacttgaagcagtgctatattagagtgtgttaaaccttctagaaagtccagctatttatatgcatgcatacatatctgcttcttttatttattaccgaatggtgtataatgtgaacatcagtgttcaactgtgaggttgccccttctgaaagacagacttatttatttaactcagttatgccagcccctgttttaaaattttagaaatgccacataattttggagtttcttttcctaatccaggattagacgatccagtgggaccttgctgttgttcagctgctggagtctacaccacaggagcactaagttaagctgctttagctgccaaggtcttcaggtatttgaaataagtgaatcctgaggcatagaatccaagactaataatctgtctccagcagtgtggtggcaagcctgcagtacagactcgtaaagtgttcataatgaacaaatgtttaaccaggcagctcatcacacgaattcaccaagcacccttcttgtcttcagggcctcgtgtcttccacctggacattctaaagcagtctgcccagatgcataatttcacctttgtgtctacacaaaggttgaatcatttccattgctttttggaaccctgttgaatatctgcttattaggaacaagcatcttgaggtgcttttatttcttgccagggagtgaatttaataacctagagggaaaaaagtttgtattattaggtttggctatagtcagctaaatttctagggataagaacactgtcttcagtttacaattagttaaaactgtgttgaatccatgaataaaaatacatagttgcttaactacacatgaaatcctctatttacagatgtattaaaccctaaaacccaaaatacaaattgttctctggtgcttggagcatatgttcaatagaaacagggttaataaaagattctcaagtcccagacttatcaatgtttttttaaccaagttaaatgctggtaaaaatgctatttatttgcaataaaaatcaatagcaagcaagttttacagagtagaaattcaagaagatcagataagggatgattttctctttcacttggatattattatctgagaagaacaaaatggtacatcccagaggtgccgaggttaggcgtcggagtctgacagacccacattcaagttccgtctcggctgacggctgcgtggccttggcaagttggttgccccctgtacgcttggtgccccatctgcaaggtggggactatgatggtgcccacctggtgggtctgtgcagtgacgggacaggtcacggcgctcgtgcacgctgggtgcccagtgcacggggcgtctttgttgcgcgcatggacctgcggctgcatcaccgtccatgcttctgggcttcttaaggagaccgcctctcaccttgggctttccggaaccttctccccgcactcctcttcacgtggagagtgggtgaccttgccctgctctcccggggagagcggtggtcactggtgggaacgcccctgccacgcccagcagcctttctgcctctgcgcttgcctcctccggttggagcgagtgacccgttctgccgaagtccagtcccgtgtgtgctgcggccccgtctctctccctctctgagtgacactgtctgccctgctgcttgccgtcccgctgttggcaccgctttagaccccatatttcccagcggtcaccgtgctcatttttggcttccagctaccgtttttcttaggttaccccgcgtagctggcccgtccttccttctcctgtctcttctgtgcctaccgcggggggttcccttaccaaggtctccatcacccccaggcccacctccctcgggcccctctctgcccttgccctccacctcagcgactccgtggggcttttgtgatcccagctgcagttagcgagcgcccctgtgtgctcagagacacgccagtgagccgggaaggacagagacccaagtcccatccctctggggcccccttggaatgggggaggcgaacaggaaaccaccacagtgagtgttggggtgccccgcaggcgacggtgctgagaaaaagagagtggggttgggggcagtgcgtgcgcaggctggcgggtgggcgaggcgggtggaggatgcgtggggcgcagtgcttgcgcgcagtgggtggcggggtggacgaggtgagggcctggccaggtgggtgcctgcgtgtccagcctgaggggcggcccacgcagcagcctctgggagccctggggccttccgtgggctgcttcctgtggcgtcctgcgggctggccgcccctcggtgggctccggtgctggcctctgccttccccagggccacggtgggctcctagtggcctttcttccctctccatcaacatccttgtcccaggaagaggcgtccactgcctgctacacgccacccagccgtgttcatttccgtgttccagtgtcacccgtgtgcctagaacgttcctggcacagaaaagccacgcagaaaacagctgctgggccaacaccgagaccccaggtcattagtgttaatcagagtgatgaagaggttgccattggcaattcggaagggaattcagggagagcagccgcagtgccctgtccccagagcctggtgtccagagccagagttccgagggcctcctcatagttttaaaactctttattttatttttattttttatttttgagacagagtctcactgtgttgctcaggctggagtgcagtggcttgatcttggctcactgcatcctctgcctcctaggtgcaagcagttctcttgcctcagactcctgagtagctgggatttgtgccacgacgcccggccagttttttttttttttttttttttttttagtagagatggggtttcaccatattggccaggctggtctcgaactcctgacctcagatgatccgcccacctctgcttcccaaagtgctgggattgcaggtatgtgccaccacgcccagccctgaaactactttcattttaaaacgatgagttcctaagaactagactctgatccctggaaacaacatgccaacctctggcatgcaggacctttgctttccaggcaggcatttcccaattttgttagattctcaagggagcccctgcccctgctaaagttaagactcctgtgctgggacaggcaggctcctctgatgtggctgcacgggcgcactcagcagcctcgatacaatttgaacttcttgctgacatttgaacacagaggacggcacatacatccccacatttccccacttttttggaagtctcgtgactcctggcctgctggtttcccgaggaccgcttctgctggagcgatggccacttggggagggtcggtgctctccactggcctgagttgctgggcccatcactgctgcgtcgaagcctgagaccaccccacccggtcccaaggaggacacaggcttttctggtttggttgagacttgcagagcctaaagaaaactgctgagttgtttttgcgagttacctaatggtgctttagctgctgcatgcttttgtcccatggtgcgtttgtttgtaattcaccacagctgtaattgcagcagagccagagagctttctccttattacatatcctgagaaggaagccctggcagcccgacctgagagagggtgatgtggctcactcatgcagggatgctgggacatcaggctgggagtcaagagatggaattttaggctttctctgccaccttttacctttgtaactagggttgatgtgtgaaccctttgggcagattaatcattagttgcctctttaaaccaatcttttatttatttatctttatttatttatttttgagacaaggtctcactctgtcacccaggctggagtgggtgcagtggcgctatttcggctcagtgcaacctctacctcttgggttcaagtgattctcatgcctcagcctcccaggtagcttggattacaggcgcctgccaccacgcctgtctcattttttaatttgtatttttagtagagacagggttttgctatgttggcaaggctggtctcgaactcctgacctcaaatgatccatctgcctcggcctcccaaagtactggcattacaggtgtcagccaccgcgcctggtctttaaaccaatcctttaaatcttctccattttcaaagtagagtgggaagaaactgatttttctatgaataaagattgtgtaagtcgttctttcaaatgtgatttgtgttcacattcagaaatttgttagtgacatattttcacttatttgcaagtgcctttccttacagtttttctgccactcaactcagatgagttattctcaaggataaagaccacttagatgaatatattttcaaattcttactctgaatgtgtttaagtaaccaccctctaccccgtttggcaaaatgtttcccatttttctgtggtttttattttattttttgtggctttcagaaccagatcacttcttggaaggcatattagaagtttgcagttgagacgataaaataagtcactttttcctgggaggtggtattatgtcacacatcatttggtatcaaaatttcccccggctgtggctgcagagttgaaggacatcagctggctgcgcttggggttggtggtccgttgtgaactctgcaccgtatagtgtgtgtgctttatgtgcaaacgttttaacaaagacaggttgctgcgggcaagaagggttttaacttctgttcgtgttacttctgctgagttggaaggagcacatttcacagatgatgtcattggtggaggccgagcctgccagcaccttgtctgcgtgtgctttggctggacgatggtctacactgggcccctgtgcagcctcctgccggggagcctgtgtcccacctggctctgctctgagccattcatgtcgcctccagtggcagctgtaaaatgaaactcatggcctttgctgtctctcttgtcctgggtggtgaggatcaaatgaacctttattaatggacatgaaaataaccttgtaatttcatacactgaaattacacttttcgtacgcttttcaatgtaacacattgtaaagcgctgtaaaaatatctcaggaaagggctgccaatttttgtcacatctcatgtgacaaaggtaattttttttttttttttggcttggaaagggaacgaaaataagatcatttttcctggtaggaaggtaaaagattttaaagagaaggtttgttacatgtgaaaaaaacgatttgatcaaaggcataattggttgaattatgcattcgacaaggatggaaattacacgttcaacaaagatgtgaagagcgtgcagcctggcaaggcatctctgtccttagcgtgcccacccccaatacgggaagggcaggagaggctggcatgaggcacccgtggtccgtgctgtgggcacctccgggaggcagcctgggacaggcgggtcctgctccagagagagaaggggctgccgtccggcatgtctgggaggctgggtccttccttccccaagggttgtatccacagcccctctcgatcctcacagcagccctgtgaaggagcactgtgccatcctgtgacagggcagccaggtctcattggcactgggtgctgagggtggtgggtgggcgcaggccttgatgcctgactctgaccttgttctccccggcgtggtctgcaccctgtgaagggtgagtgaacgccctcctggcccagttcagccccaggttgtgcctgttgtccccacatcgttaataattatccatagcgtccccttcactcgcagaagcgtccgagcttagacagcaggttccacggccactccaacatgcggtctcaaacccagggcctgcaactcccgccatgtgccccgttctgcttgtcacccgcctcgccctgaggagcctccagctgcttcaggacttgtccctgtgtcacacatccagggcagttgttcactagcatccccgctacccctgaatccatctccacgtgcgtgggcttggacctgcttctctcgcccacttatctgtgtatctctgagtagtgagacttccacgttagcgctgtggggaagaggctgggcttggctcagctgctgagggatcagccgaccccaggtcgctgcggccctttcaggaggacgttggggggcaggagtggccggcggccacctgagaatgggagtggcacccgaatatgtggaatacacagaaattcgagtccgcctgtggccgtctccacggtcctttctaccatgatttctccatgtcccctgcaacagcgacccatcccagccaggagaggagaactctgggaggttgcctggcagttacaagtgtgttaagtattgttgctgcgtgcttatcagttaggctcaggcacagctactaacttccaggcatctcggcagtgtctggcgtttggcagtcaagttgtgtttagttttgacttaaagattaaaaggttatagaatacaggaataatctaccttttgaaggaaaacttgccaagttcgcctgacctttgaaatgccaagaatcccagagatgttgaaggaagtgcccagaggaagatctggtccacagtgggtattcagcacactgatttctttcctataaaaaattatctgtcagggccgggcgcggtggctcatgcctgtaatcgcagcactttgggaggccgaggcgggcggatcacgaggtcgggagatcgagaccatcctggctaacacgatgaaaccccgtctttcctaaaaatacaaaaaaattagctgggcgtggtggcgggcgcctgtagtcccagctactcgggaggctgaggcaggagaatggcgtgaactggggaggcggagcttgcagtgagaggagatcgcgccactgcactccagcctgggcgacagagcaggctgtcaacacatttataaccccagcaatggactgaggtgtgagtaggttccgcgtcgcccttttcctcccagtgttacccccggcactgtgcttgtgtctcggcatcctgtggatggggcctgcggttatccagctggtggttcatgagcacacacatgcctgaggagatggatggagacaggcgttgctagtagcagttcctcctcttgtcacagagtgtgcaaaaacactcttaagtacagcctggtgcgatgggtcaagcctgtaatcccagcactttgggaggccgaggcgggtggatcacctgaggtcaggagttcgagatcagcctggccaatgtggagaaatcctgtctctactacaaatacaaaaattagctgggcatcgtggcgggcacctgtaatcccacctactcgggaggctgaggcaggagaagcgcttgaacccaggaggcagaggttgcagtgagccgagatcgcacctttgctctccagcctgggcaacacagtgagattctgtctcaaaaaaaaaaaaaaaaagaaaccactgtaagtacagacaccgtagcaaccacacggaggccccccgccccgccccccgcgtgttccagtgggaagcagagcctcggaaggcgtgcacacggggggtgcgtgatggtgtctccctctgccctcagatggccaggcctcgggcccgatgtgccagggtgggttcttgtgttccgcgggcttcttgtcccttctgtctgctgtgttgtgcgtgcgtctctctgggtggccttggccgggcttctctctctgtgagacaggcgcatctctcagggctttcttcgttctgctgatatctatcccctctcaggaccactcggtttcaaaagcggtaactaaacttgtctaacacgtgtgcatgagaggaaggcggccagaggcatgggtctgagggctttgcttgaagagcgggcggtgtgcgtgtctcgcagcgcccccacctcggtgtctcagggccttgctgtcttccgcctttttcccagcgtctcaccagcaaagtgagtttatgagaatcatgttaacacacaggcttgatgattgagaaagcagatgctgagaatgtgactatggaatgaataattttcattatgaaaaactgatacattgtttacgacatgattctctgagatgcttgttgctgagattacaaacttaaatggttttattgttatgtaagcacctagcatcttagtgtggagctgaacaggtactgcctgtgtttcagagagctcagccgctgttacagaatactgcaggctgcatggtttacgcaatagaaatttatttcttgtagctcttgaggctggaaatcagatcagggtgtctgcatggtgaggtctggtgaggggccctcctggggggcaggaggctgtgtcctcccagaggcggggagagaactctctctcttcctcctcgtaaccacacaccaatcctgtctgattaggacacagacctcatgatctcatctaatcgtaagtacctcgtaaaggcccaatcttcaggtccaatcacattaggggttagggcttcaatatgagatttttgaggggatcacagttcagcccacagcagtgtcctggtgaccgaggcactatttagatggcgaatattcagacggatcggaaatggcaaagaggacagtcagaaaaacacattacgccttgtctgttgctttatgaaatagatgacagaagcatgttccacgaagtctggaaagacagaacgtaattacttagtgagaatgggttattttttaagttgtggaacaaagttaggtaatttgacccttcttagatgtaacagaccgcagttcccgtggttggttcggatctaaggttctgtgtatttatgtcttctttttgcttttttttttcccactggagaaagctggtaggggagaggtggttggtattaaaacaatgctataacatattgttttggtgtttgcattacaatccaaacacacagcatctggcttattgacaagacagatgttagggtttacatcacaaaacgggattgggcctgtctgctcagtaaactcagaggctgctggatcatgatctggttcttccagtaaatggaattgctttttggagcccatactctgttcacctgcgtgtgtggaggaggacgtcttaccgttgacaaaattggaccgtgctagttggaagttgcacttgaaatgcaggtcagaacaatgggatacgctggtcctgctgtcccaggcgggggagtcacgggagggctcgagtgccacaccacccacacgtcagccaccatgtgggttcccaaggcaagcagtgagttcccaagccagctgtcgtccacctttctgggttagtgtctttttaaataatcaaaggtctttaccatccattaagtactggcccagttgttgtacgcacaactcagaggtgattgtaggttgtgactgctctcagtcggtagttagggtggcctctggcgattgttggaggaattatgggtactttgcgctctctttcactgaaaatgcaaggccaagtggctccagcactcagcagaaaccataactggttttgatgctcttgggagcccaaggccacagtggctgctctgcccccgcgttgtcttatctggaaaggtctgtgggaggcgaggctctgactgcggcgtgcgtctcaggtttgtatctggagcacgtgagagtatgagatgggctgggggtgtccccctccctctgtacttgctcaagtacaggagcagcttgcctgagtctgagatgggctgggggtgtcccccactctctgtacctgctcagggacaggagcagctcacccatttccttcattctttctggctttgttgctcaccattgcctgggaaggaagtggctgcctaaataattaaataatctcctgcttcagagaaaagaggatttcctccaacctattttcagcaaaggattagggacaatgaggtcctgccagtagaatgccatctagattttggtgtggttttccaaggtctcagattgcccacgaagacatggaaatggctttcagacctcagcgggacccctggtgtgggggatgggaggtttgcaggcaaatgggaccacagattctccttcactttccgataaaatgcctcacaaacgtggaataacgggcatctccttttctctctagaaagtgcagtgaggtgacgtgatttcactcagataaatggagacaaaccattaaaatattaggtaaccatcaagtatacacgtgcttttttgttttcagtaataaatgactttggtataaatctgaaagcaacatgtaaaaagaaagctggagcgactgtcatggtggctggagtttccttttgtcctcatttctgatgttatttaactccttttaccatttctcggatgtaatgtggaaacaaaatgtgcaggccctcggcagcgaatgacacgtagagagggaaaccctgggattctcgtaggggagggtgtgtgatgtcctcagcacgcgggggtgctcagcagttgatgttcatcccgcacgcactgagcagctgctgtatgcgctgaagattctgtggggagcaagaggtacaggcgccccagctctcctggagactgggcaaggatggaaggcacatggcatgtagcacacccgctgtgaggaggcgccagggacaaaatgagaagggaagggtgtccgggacggggcatggaggacgggaagccggcagggaccatcagaggacagctccaggcagaggaagccccccaggagggatgagcagaggcctagtctgagacctaagcaggtgtcgactgcccctttagttttcttgctcacaatacagaatgtatgtgttgcttttcaatagtgttttaagcttgtttaatattatacggccaaaggaggaaaatgttacatagtaggtaaatttggatgatttttaacattataaagatgtattgctttattgaacgaatatacaatacattgatttataggtaatttttttattgtggcaaaacatacataaactttaccatcttgtccattgtgaagcgtacagttccatggcgttaaatacactcagtgctgtacgatcatcaccgccaggtacttccagatctttttcatcatcccaaactgaaactgattaggggcaattttaagtagtttctgcatctactattgtgtagcttgctttttgggcaacactcttttttttcatcagtgaaagagatcttaacgggtgaagagaagacattgaaacacaagtgctagttacgtttaaatgcaggatggaccgagataggaggatttttttcttttaaataattggccatagtaaaaggtaaaaaggtaaaaacttgaatgtgaggactcatttgcacttcatattttgcttaatatgctgagagctgcaagagaggaggatctggtgtttcatcttagagcaaatcatacttgatagtaagagacagaaagtcataaaagcgtgatgttcagcaggcaggacatttaaatcatacagctcataatgatgttagttgatggtgttacatggttccatggctttttcctaagtgtgtttataagaaattggaacgaggatgttttctgtggcattttcttccaggagctcggttctgctaattgcttggtttgaataagtgctctctttccagttggtctataacatttcttttactatctaagaaattatgaagaaatagattgattaatttgaaaattacatttaagagtattttcctgtaaaattgttggttctgtgaaaaacaattcctgttatttcttctctaaatacaatgagaattttttttgttcttatattgaaatagctctttgatttcctaaattgctgtgctgctttttaaaggacggcatggtttcagaagctattaggttggtgcaaatgtatttgcggtttttgcattgttgaaatttgctgtttgatattggaatacactcttaaatcaatgtggttatgccacacatcattttaatgtgaatttctcactttatgcttttttgcgactgagttattacttgccgtttaagtttattttagactgtggaaaagacgttagacaaaaagcaaattcgagcgattttcttattcgagttaagaatgggttgtaaagcagtggagacaactcggcaacatcagcaccacattgggcccaggagccgctgggaaccactaaacgagcatacagtgcagtgctgggtcaagaagttttacaggctgggcgtggtggctcacacctgtaatcccagcactttgggaggccgaggcagatggatcacctgaggtcaggcgtttgagaccagcctggccaacatggtgaaaccttgtctctaccaaaaatacataattagccctgtgtggtggcacacgcctgtaatcccacctactcaggaggctgaggcaggagacttgcttgaacccaggagacagaggttgcagtgagctaagatcacaccattgcactccagcctgggcaataagagtgaaattctgtctcaaaaaaaaaaaaaaaaaaagaagaagaagttttgcagaggagacgagggccttgaaggtgaggagcgtagtggccagcctttggaagttgacaacgaccaactgagagcagtcattgaagccgatcctcttaaaactacacgagaagctgctgaagaactcaatgtagccattccacagtcgaccggcatttgacgcaaattaaaaaggtgaaaaagctcggtaagtgggtgcctcatgagctgagcgagaatcaaaaaaattgtgattttgaagtgtcatcttctcttattctacacaacaaaaacaaaccatttctcgatcagattgtaacgtgcgccgaaaagtggatcttatatgacaaccagtgacaaccggctcagtggttggaccgagaagctccaaagcacttcccaaagccaaacttgcaccaaaaaaaggtcctggtcactgtctggtggcctgtgccggtctgatccaccacaactttctgaatctccacaaaaccattacatcttgagaagtatgctcagcaaatccatgagacgctttgaaaactacaacgcctgcagccggcattggtcaacaggaagggcccaattcttctccatgacaaagcccaaccgcacgtcacgcaaccaacacttcaaaagtggaaaaattgggctgcgaagttttgcctcatccgccatattcacctgacctctcaccaaccagctaccacttcaagcatctcgacaacttttacagggaaaacgcttccacaaccagcaggatgcagaaaatgctttccaagagtttgtcgaatcccaaagcctgatttttatgctacaggaataaacaaacttatttctcgttggcaaaaatgtgttgattgtaatggttactattttggttaataaagatgtgtttgagcctagttataatgatttaaaattcacggtccgaaaccgtaattacctttgtaccaacctaagtccccttattattagtaagaaacttaattgtaaaatggagtaattatatattttacatcgttagactcatttaaaaaccgcaagtatagcatgaaattgactagaaaccctatttgtcaggtaatcttcgcagttgacagaaaagtaaaacgtaaaaggagtattaatggcttttccttagcaccctcactcacaattttagttcattaaaaaatgggttgatattgatttctatcaacatgtcacccttgcaaacctcagagcgactgagtctgatggacagtttctcggcttccctggctgtcactcagatgtggcctctcactgtgggccccacgtgggctgcgtgtggccctgtgagttggtcccacccctgcccgacaagcctgtagctttggtcgtcttccaacgagtggctctcccgcctgtgttttgaactcatggagggggagggggagtttgtgcagagaatctaggatcatgtgcatctgattttatgtttttaatgggcctggccaaggaagagagagtgatttggttcctgtcttaacttgaagaccctctggggcaggcacatgttccagggtagactccgggagggatgggtgtgatgtgtctgtagggttccaggcgggaaggggagtgccggaagcaggtctgggagggggaattgggtgtccccagccagcctgtctcaggggcccatgtgggactcttggccagccctctgtgcccctcctggctgtgtcttcaggactaagctctgatttttttttaaatttacccaaattcctttctaaggggtctggggagtcatgccctacaaatcataaattctcatcagatgggttttatttaaccctgtatatcatgacttactttccaatctgactctggcataacaaggaagaaaatcaaaatgttttaccccaaaatatatttccttgtcataccttgaaattgccctgcaaggtcacttgtgggaaaaatccacattctgtagagaatcctcttccccctttgttttccttctttcctttccaggtccaggcaataatcaactaagatccaggcacccttttaagtctgataaaaagcaatttacaacctgccttctctgaagtccgctatctaagagcttcctctgcacaataaaacttggtctccacaatcctttatcttaacctgaacatttcctttctgtcatcccaggtcttcagataaactcaaccaattgtcaaccagaagatgtttaaatttacctatagcctggaagcccctcgctttgagttgtctcgcctttctgaaccaaaccaatgtatttcttaaatgtatttaagtctcatgcctccctaaaatgtataaaaccaagctgcgcccgaccaccttggacacatgttctcaggacatcctgagggttgtgccactcatatttggctcagaataaatctcttcagatattttacagagtttgactcttgttgtcaactgtctgcaaataggagctgcgcccatgagggcatagcccagttaggccgcgctgctccctgctgctgaccagcccctgttggagctgatgctgcccacatcccacagctgagagcaagggtctcaacagcacaggtcctctgcctgcactctgccctggagctgggcatcagccatggtgagggcctggaactgcgtgacacccgggtgtcaggcggccactctcagcatccacattccctcagcatcacggggaggccggctgcagtcgggaatcacgagtgtcatccatgtggtcctccctctttgcagacgtgtgtgtggccgtggtgtttaagttgtgtctgctgccttgggggccctttggaaaggctctttctcacaaagaatgcatcgtgttcgcaaagccagctcatgcctcctaatgtaaactcaaaacccaattcacccctaagcaagtggcccacaccgtgtgtgactggaaaaatcagtgtttcccgacaggatgtgacaaatggggctgtagcagggcagggccgctccccagaaaacaagcgccccaggttttcccttctcctgtaccactgccctggaagagttctacccatgagggcccttggagccatctcgactagaacgttaacaggaaggaaggagcctgcgggagaagacagggctccaggaggcggcggaggcctctgtggtggccaagcaggccccgcagggctgagctgctgggttttcctgggcctgggctgctctctggttccagggaggggttgtaacactcccggcagagctgtctcatggggagggcgttcacaggtggtgagtgtggacagtgaggggaagaccagttccagtctttggcaaatgctgatagtaatgaaaatcattttaaaaatcataacagggcagacaagtcacagctctggttggtcttcacctgccgtcactatcatccctgcagggagagaaggttcggctccctggggctctcccagccccgcgtcatgtgagggggcactagtcacagtgcgggaggcttcagagcggagggcagggcccctgccaaccacccggagccacccacccacccacccaccgctgtttgaagcagggactcggttctcaaagtgccggggtcagaggtcaccagaggctgctgaaatcagggttggagggctggcatgttcgtatttgggggaaggaggcaggatcccaggggacccgtcctgcgtgctgacactttaccacgaggcagctgggccgcgtgcggctcttccgacttttcatcatgcttcctgagccagagccatttaaaaaaaaatgctgaaatttagaaggtagtattcgctctaaaattttgtcgcttaaaaaagtggcttgaagtattcagcaggaaaattgtcccaaattacttgttaaaactaaaagctgggccaggtgtggtgatgcacacctgtggtcccatctacttgagaggccgaggtgggaggatcagatcccctgagcccaggagttcgaagccaacctgggcaacatagcaagaccctgtctctgatacatacgtaaataaaataaaagttaaaactcaaaggggaggaacctgagatccaattttaaatccacctgatgagaaaaaaaaaaaagcagcccagggacgtcaccgtaaacaggcaccgcatccaccaggggtcaggagtcaggtcagggctctggactgggaggggcactgcagggacatcccgtcagcgggcaccgtgcgttgagccaggggtcagggctttggaccgggcaagactctgttttgcttccattttttaagcctctggaagtcctggctgttcagaattccaggcttgaattgctagtgttcccgggactgggaaacagcccggatgtgtggagtaagaggcagctcttggattgctgtgaacgtaggggagcaaggctccacgccctctcccagcctctctgccttctgaatacagcccaggagcctggatgactcactttctggagcacatagataaggagcgggtggaggggagaggccttagttaattaacattcctaggaatctgaggctccttctcccagccctgttgtctgggtagcaacgtgctgaacccagagtgagaacagctggctgcagtgtcaggggcaggaccttttgtcgatgagtttaaaaaacaaagcagaagctgccaggtgcctccttcgcatgttggctcccacgtgttttccccgttctccctccccaccctgagtgacacacgctatgctgcttgaaaatagcacagatgcattttgcttcacggtgaaatgtggccggtagttccccaggagtaaacaatgtggtggtgcccacgggggaagagcagcttaattatgcacccagccccgcatacaaaacgctccctccatggttagaatttgctggggctaagggagtcagggctggttttctccagcagccttggagctaggtggtgtcatttaaatggccctcaaagccctacctggatgtcttcattgtgccacaccagcctttatccaagctcactgggccccacagtgtggctgatagtgagggtctgggggtgggggatcgtgaggtgagggacagcaaccccgtcctgtccttgtctaggcctctgagacaggcccgaaggacaggcttttctctctactgtgggtgatggtcccggctggtcagctagcgtccacagcccctcgactccctgcgcagagcccctctcactggaccggcgtcagtgccccacagagactggaaacctgtttccaaggtgtggctctatggccggaccacagtcggtgaggtgagggccagttccagccagggtgccacctctgccttttcttatgtccactggaaaaaataaagagggtgtttgtcatcccctgtcttttgggactcggggttcagtgcaggccaggggaggttgtgtctctggtgtttgctgaacacaaagcgtatgaaagtggtaacacctcggaggtgagggctttctttttatagcagccatgctggaactcagtgtctgaggagacctagagtatttgtttgaatgtttgaaagagacgtatctggttaatgtgagcagaggcttggaaatttagagcacgctcgactgtatttcagtagacttatgacagcagctacacatccatccattttagcattctcagagtattctaaaacatggagggctgggcacggtggctcacacctggaatcccagcactttgggaggctgaggcaggcggatcacaaggtcaggagtttgagaccggcctggccaacatggtgaaaccccgtctctactaaaaatacaaaaatttgctgggcatggtggtgggcgcctgtaatcccagctactcaggaggctgagacaggagaattgcttgaacctgggaggcggaggttgcagtgagccaagatcatgccattgcactttagcctgggtgacagagcaagactccgtctctaaaaaaaataaataaaaacatggagttcacaaagtggcatgaataatcatgaaacgaagtgacttcaaagtgtaatggttctcatgcatgtaagaattcatgttattaaacaagtataaataaaaaaattgtgcactgcataagtgacagatagttttgtagtatttgttaaagtgccatcatagccgcctgtgaaagaggtctcagtaggtgtctgattcttgtttaatgccacagcttctgagactccatttgtttcaggcagagtggacatttcactcgcggtttaatttgcgggaagatcacattctggccgtttaatcttctgatgacagacagctaactgttgataaggataaaatgaaaccagacatcggtttgcatgtgtccagttgaggggaaaaaggccgaggatgctgtcaggacgcaggcaggcaacctatttaggatggggagtagcagttcagagggtgtagcttccattcctggccccagcctcccttccactcctcccacccctgatcccagcctcccttccattcttcccaccccagatcccacgcctcccttcccacccagcttccattcctggccccagtctcccttccactcccccccacccctgatcccacacctccctttcactcccccgacccctgatcccacgcctcccttccactcccccgacccctggtcccagcctcccttccactccccgcacccctgatcccacaactcccttccactcctcccacccggcttcctttcctggccccacgtctactggaattccactcctcccagctgtcttgcacccgctctctttccccttgttttctcttttccttcccaattagcaccgattttccttccccgattagcacctcccgctgccgctccagctgtgttctccatctcctggtctggggtgttccgctgcagccacaggaccccactgtgggaacccacgtctctgcagggaaatgtttacggtgactttcctatgtgtgtggctggctcgtcagggagcggtgtggaggagacctgaaggacagcccttccccttccctttctccctcctcactccccgaaccctgcccagctctgggcctccccagggctgaggagaggtggcgtctccactcctgacctggaggcccgtctggcttctggctccagccccctctgctgccttctttgtgtgtctgtgatggaatacgcgttctgcgtgatgagactgttatggagacgcaagagaatgtgaaggtgaagcttctcgaccttgggctggagcgggtggggtgctgagagcaccgagagccccttgccacctcggcttctggcaggtcagtgaggccactgtggatcaggcttttaagatcatgggaaaacacacataacaaacatgcaacatcttgtctagatttatgtgcacagttcagtgctttagcacgttcaccttgtgtcaccatcaccactgcccccccgcagaacttccgcttcttcccaaactgaaactccgtcccgcttaaattctctcctccttcccccttcccgtagaccctggcagccccattcaactttctgtctctaggtatttgtcagctcaaatgagtgactcacacaggatttgtccttttgtgaccagctcatttcactcagcacaaagtccacaagggtccctgtgttgtagcctgtatgactccgccgttcctttgcatggatataccacgttttgctcacacattcacctgttgaaggacacttgggttgtttcctgcggcagcttttcctgaccgaaagcttctcaaaaggactagccccctcaggtgccccaaactcgattgcagaagactgtgttgtcacctgcctgcttctacagagaggcaccaacctggggtgacatgtgcactcttggctttgtagtgtcctggcccatccccggtacctggccaatcccctacacctggcccacctccccacacctggccgatccccccacacctggcccacctccccacacctggcccacctccccacacctggcccacctccccacacctggcccatcccccacacctggcccatccccgtacctggcccatcccctgcacctggccgatccccacccttcacttggctgaggcccccccccacctgcctgatcctccccacctggctgatcctccctacctggctgatccccccacctggtcacactgcccctcctccccagagggttgcccctctgtatttacagttgattaaaatcttactttctctgggaattctttacagattaatcttcttccaaagacaaccctaacctgtgccttttcagcagttgtgctattttgcaggacgaattcgcacctgtttctgtgttgctctgtgatcattcccaagtggcttgggcttggagccctgttgctcacacctctgggggccggggaaggtgtttgccagagagacagagtgtatggccttgagggcaccttctccttagaaatccgatcccattcctttccccttctcccactaagggctctctgagggatggtagtggctgggtgtggaattgggttttgctttgctttctctccccagcagctctgggcaggctggctctgtgggggcctgggggtggctcctgcctggactttgagaattggagaggcttggagctcattctcagtggagttcccggtggctgctccgtcttctgagcctggtcctctggccttctgcagatgctgggagccacagcaccctgtgatagaccttttgccagagctcccatgagaagcatccaccgtggtggggccaagtccctaggccccaggcattccccatctggtgggaagtgggggctttagcaagtcgcatctctctctgcccctcctggtgagctctgctccgacagctgtgggaacccgtgggaatgcccacctaggtgcgtgtggcctggcgtctccccagattcacttcctagtttttcacttcacgtggcccagacactcagaaggaaccaccaacccagtggtctgtggtggctctgggggcctgtgggggccaccacctctagtctcctggtaggcatcccctccgcctctgggaggacgggagccgggacagagggggcaaggaggcctcctgggactggggcgttccccaccttccactgtgccggtcttcatgcagggccagagcctggctcggggctgggtttgcactgagccaggtcctgactctcacccatgtcttgggcacgtcgatggggccgggccgctggagagggtgtgagagcaggttcctccccaggtctcagccagtgacggggcccatcctggacttgggggctctgcgtgagtggggcagtggcagctcctgcagggcccaggtggggtgtgggtaggtcggggaggctgctggcctcccagcctccctcaatttctgcgttctaaagatggctatgtgcaaaataaaggtgaaatgatggggcagtactggatcaggtggacatccgggagctggaggcccgtgcactttccctgggacgggcagaggcttgtggtgtccacccacagacgcagacccactggcctgcagggcccatagaggctgttgttggccctggtgatgagtgggggacacgagtatgttctgaaatgagggggaggcttctgttgtgaccttgaccaggaagagaaagagaagccaggaggagagcagacacgcttccgccttgaggacggcacttgttcaagtgtaaagaacggaacaatcgggacaaaatttaaaatgcaaatatggtctcatttatttgtaataaaaggctgctggaaagtaggtgcaggagtggcccaggttagcataatactttttctcctaatcacatccaacttgtttttctactcttatttcagaacatgcccccccgccatcccaggagaagcagcagctctctgcctccttgactgagctccattacctccaagctgagagggttgttcaagagggcgtgtgggattcttttgaaaacacatttttagaaagcacccttttaacaactgaacatgatttggttgaaaataaacatccccgggtactcttgtggtacatgtttatgattttgatgcttctggtctgaatgtacaaccttcacattgtacattacaaacactactgtcaagtttatagattttcattttatttgctaattcatttttcagttctctgcactgcttgtaaatcaggcaaacctgataaactgtctaaacatatgatgatactgaattgattaagttatggtcgtaggtgagaaaacagtacatgttgtgtgatgccattccgaaaaagtttcaaacacacatctgtgcattagaaatgattgccacgtggccaggcacggcggctcacgcctgtaaccccagcactttgggagaccgaggtgggtggatcacctgaggtcaggagtttgagaccagcctgaccaacatggtgaaaccccatctctactaaaaatacaaaaattagctgagcgtggtggtgcatgcctgtaatcccagctactcgggagccgagtcaggagaatcacttgaacccaggaggcagaggttgcagtgagccaagattgcaccactgcactgcagcctgagtgacaagagggaaactccatctcaaaaaattaataaataaataaatgattgccaccgccccctgccccccaccccgccaaggcgtgaacaggagttgtctctccccctttgctgtgtgatagtctttttgcttgaatttattttgcttttccgtaaagaacactcattgcttttaccattggataaaaagcataaaaacaatatagatattaaaagcacctggatttttttgacgctttaacaattttaaatttcttttcaggtgacaatgttcaactctgctttttgtttgtgctcatgaaattttatttgttagccagccaaagccaagtgtttccagttaaatttacaactcttctgtctgttccaaacacagcctaagcaagaagacaactgtgccgcctgccgcaagtttcatgtgaaatacccccagagggcagccgcctccgctgggggtcctccctccgaggtgtgtgcggtggggatgggaacccgcagaggcagcacccagctacttgccacttaggttcttctaactgccctcgagagattgtcactgggtcctggatccctgggtttggattagcagtcggaccagggtgggcttgcaggctgcacttttttttttttttttgagactgagtttcattcttgtcacccaggctggagggcaatagcacgatcttggctcactgcaacctccgcctcccaggttcaagggattctcttgcctcagcttcctgagtagctgggattacagttgcacgccaacactcccagctaatttttttttcttttgtatttttagtagagatggggttttaccatgttggccaggctggtctcgaacgtctgacctccggctatccacccgccttgccctcccaaagtgccgggattacaggcgtgagccactgcacctggcctgcttttgaaataggacgtagggattgagggagggttaggatttcaacgatggctttaacagaagaagagaagatgctgaaagtccggcttatttgaactgtgtgtgtgtgactttgaattgcgtcaaatgccatcttggtgaacagttggaggggccctcaggatgccctgtgacgcgcaggtgtgactttgaatcgcgtcaaagaccgtcttggtgaatagtcaggggccctcaggatgccctgtgacgcgcaggcaggaaattatgatggtgtgtttcaggtatgcaaactgcaccagaggcaacacaaaagcaagtcaatataaaaagactcaatgccttgcatgcctttgttatattctcacgtaatcttcaatcttctgttcatgactttgttttgaaacacttttaaaatgtaagattaattaacttgtaggctgtgggaataatcccatttgccgaatcaaaataatgtatccttgattccaactgtcagaagacaaaattacaaaacatttagttatagatctgattggattttaattacaattccttaacggggcagcgtccgttctacataatgagagctcccactgggcaatggcagaacagtcagttttgtaaggtggaagcaaggaaacagaataagaagctgatggtgaacttcaggttacttcaggttacttcaggttacttctttgtagagggtaaagcagaggggactttgtcacttgctgactcaggtcaacagaatctcctatttttgagaaaaaccggtctgttttgggacctgtcacttctttaaagttccattttggtgacgtggcattgagcaggagcaactccattcctgtttggtctggtctgttggggcctagtgctggagctcagtccaaaacaacagtctcccataatttaaaaaaaagtatttccatttcatttctggaaattcagcctaagaaagtcatatcccaagtgcccacaatcatatcagaatgttctttgcagcagtatctgttgtagcaatgaaaacatctcaagtctgtggataagggattgatcaaatacattaatgaccattctgttaatggaaagaccaaagtctgtaaactattttaaagaggtttattctgagcctgtctaagtgactgtgggctggggaaacagagtctgagaaggtgcacctgaggcagtcagatcacagtttgggtttgtatattttagggagacaggactcacaggcaaagccacaaatcggtacatggaaggtatacattggtttagcccagaaaggtgggatttcttgaaacgggtgtcacaggccataggtggagtcggagattcttcagtgtgcgattggttaaagcagtaaagctttgttgaaagcctggagccagtggaagggagtgtttagatgaggaaacccacgcccgacgcgcagggtcagggttacctgtggggtgcgttcaccttcgtctgctgtggccgcgggtcccgtgagcctgggttgaggcaaagaggttgtggagaccggggctttatcacgcagatgaagcctctgggtagagtctgtttgttttttttttaatttttttgagacggagtctcgctctgtcgccaggctggagtacagtggcatgatctcagctcactgcaacctctgcctcctaggttcaagcgattctcctgcctcagcctcctgagtagctgggactacaggtgtgcaccaccacgcccggctaatttttgtattttttgtagagatggggtttcaccgtgttggccaggctggtctcgatctcttaaccttgtgatccacctgccttggcctctcaaagtgctgagattagtcttccgtgatgtctactttgacatcagtacctaaaatccaaatgggaggggccaggcgtgttcaacctcccttatgtcgtggccgagaattcagttttgaagttgcctctggggttcctttggccaagaggggtccattctgttagtgggggccgagctggaatttggctcttgaagtcagaaggtgaaccacaggccacagtccgcagcctccaggagctactgccgccagctgagggccacagttgctgatcgggaaagggtgtatgtaaggccagtcctctgtccggtcagaagtggaagggtctgggttgtaaatcagagttagggtccgattgctcctctcattagggagttggagtgtgtttttttcttgtagccttaggaatttaggaagttgctggaaccctctgccccgcaggtaacttttgtttccttagcgttagggtccatcttagtcaagaaaactgtttgttttggtctcttagatcacaaatgttacgggaaagaagcaggaaggaaggctgaaaagagaaaacgtacctttgctcactaagcactaagaacaaagaggctttgttctcttgcgtgtgcatttggatatgtcgagggaagccgggtactccaggcagggcccagaggtggtgtcaccctggcagcacactgcagcggtcactgctgaagacacagaaacagcttcccgtgttcttggacttgacatcaaagatggaacggggatgtggcctgggaacgaggaacgtggaagccaggagtgaggaagtgggagggtcccacaagacagcagaagggcctggggttagtcccggggtcagttgtgggacgctggtgctccctctcctccacggctgggcttcccggggtcatgaacctgtctcctgcccgcctcttctggcccccagcgaatgacattgcatataactgcttttttagagtgttaagaaaaaggctgtttcccaaattcagattagtatgagcaaaaagaaggagaccacataggagccaggatgtgagggcgaccaggaggttcaccaggccgtcagcaccgcagccgctggaggcgccaagtgcaggccgtggcagacaaggggaggccggcacactgcccaccatgggagctgctgggtcattttaacttaaatatcctggggccacataaccctgcaatctgaaggacgctacagtttgcaaaaaccaaactctgtatcagtgaagggtccaactcacaatatttgaggagatttattctgagccaaatatgagtgaccatggcctgtcacacagtcctcaggaggtcctaagaacaggtgccaaagtggtcggggcacagcttggttttatacattttagggagacatgagacatcaatcattgtacaatggttttgcccagaaatgcaggacagctgtaagtgggccggcggggggtagggggaccggggaggagggtgggcccggggagaggggggcggccaggggagagggtttccaggttataggtagatttaaattttttctaatggacagttggttgaaagacttatcagtagaaaggaatgtctgggttggggtaaagaggttgtggagacagggctttatcagggtagcgagtttcagggagaatgaatagattgtaaatgtttctcagtggacttcaggtctgtgccagcgtttgtgctggtcagcctttcctgaattccaaaaggaaggagggggtgaggaggcatccgagtcccatcagggccggaagcaggttttcaggataactttggagtgcccttggcggagaggagggctccattcagatgggtgagggcccttcaaatttacttttggtttacatacgtaaaatactttagaaagatttattctgagacaatatgagtggccgtggcttggaaaaacacaaacctgagaaccatcgaggaagtggtccaaggtggtggggctggttggatgttacacatttcagggaggcaggagtcataggaaagacgtaaatcaatgagtggaaggtcgacgtggctcagccggaaaggcaggatgacttgaagtaaagtaggcggattcagaaatgctttacttttttctttttaagtattttttttcagagattctttaatttgcagttgattaaaggagtaaggttctatctaaaacttggagtcaacagaaaggaatgtttaagataaggaggccctgtcagagtcagccacagggtcaaagagccctgtttagcaggtctgacgcccgcaggcgggacttaaccctcatctgtaatggcactgggccctgtttataatttggcatcttagtgccacagagtctggttttttttcttcgatcctgtgagcgtgggttgaggtaaagaggttgtggagaccagggctttatcacgcagatgatgtcttattggtgtcttattgccacagagttccccacctccccccgccctcttgtcattcaggctgttgtgcagtggcgcgatctcggctcactgcaccctccgcctgccgggttcaggctattctcctgcttcagcctcttgagtagctgggattacaggcacacaccaccacacctgactaacttttgtacttttagtagagacggggtttcacaatgtcggccaggctggtctcaaactcctaacctcaggtgatccgcctgccttgtcctccccaagtgctgggattacaggcgtgagccaccgtgcctggccagagtgtattctgtttgttttatgatctctgtattgatgttaatgctggtcagttgtgtctaaaccccaaaagggagggggtagaaggaggtatgtgtaacctctgtcatggctgggagctcagtttttaagatttttctggggttcccttgaccaagaagggatccattcagtcggaaggggcttaggattttatttttagtttgcaagttgaatgtctaggcagctgactgaaggttatttgatgaagccaaatgcctggatgctcccaaagtgtgcatatctggtcctctgtctcgcccgaaacccggaggccctcagggcctgtggattcccgggaacgctcgtgtcacacgggctcgggtggcatgtgcggggacataccacttaatgtacatacaagcctgtcgtgtggcgcagttgatctcaacttttaaataaagaagatgagcatcgccccctccatcatccctgcccacacctctcaccagcgcccactgcctgggtgtggaccagcccctatcgtccccatcgcccccttcgcccccttctcccccatcgcccccttcaccccctttgcccctattgcccccttctcccccatcgccctcttcgcccccatcggcaccatcgccccattccgacactgcatgccctgagttcaagtggaccccacaggttatgggctctgtcccccaagacggcctgcttcagacacagctacaagtctcagggaccacctacacttctgagcacctgccataaacgtcagggagggccctgtgactcagggttgacgatttactggaaggactcgcggaactcaggaggtcactgtgctgaagacaaggggcttatgatggtgggagcaatgtgatgggtccactgggagccccctgtccccgtggagctgtcacgtggccctcctccagaaccgtgtatgtgcggcagccaggattcgtgcatccagagtttcatcagagtctcatcactgcttgggggtctcatcacactattggccaagagattgagttcagtctccagtgtctcccttctccccacaggtcagaggtcaggctggggatggaagctgcagccctgtcctggggtgaggccggcccccccccaggaagctgtttggggcccatcttgagtctcctcattagcataaactcaggtgtggtccacaggggctcttggtgagcaacagaaacactcctgccatgtgggaaattccaagggtcctgaagcatgctgggcaccggaacagaggccaggtgtgttcctcattccaccacggagccagggtctgacccaagtgtttctgtttccaaaggtgatctgccttcctctgctccagccacccctgcggccatgcctgtggtcccctgtgtgggctgggctgtggccttggacctggtccccacgtcattttcttctcccttggggtggattgtctgtgggcccggtgtgggaccaacagctgatggccgacgcctcttgccgtaggttgccggccatgcatacctgggggaagacttgaactccatccctctgtcaaccctgttctgagtcacaagagacactgcaaaccccccttgtgggagctgactcaggctcgggctgggctcaaggcagtggggtggggacagacaggtaaacctgtgatcatgatacgatgtggacctcccatggccaaggtgaatcccaaatgctttgggagcagagtgaccaaaagaagacccctggggagcagacgaggtatgggcagaggcatcaccccctccactctctctgctctcagccctcaccagcccactgcccgggcatgcaccagcctccttcgcccccatcgcctggcccctgccacctgggtttctcagccgctgccttcactcacccctccccacaccagtctggagtgataggctgcgtctgcacgcggctggctctgcctaggtgcccaggagtgactggcacaagtgtgtgctctatgtgcttaatgcctctaacgaccaagtgtgggaagcttttctcgtgtgtagtaatgaaatagctcagatgtaagcagaacagatgcaccagccctcccatgccccagccagtgagtgtgtggctacagctgtggctgcaaagtccccatccctggagttccttggacaggagaagcttctatttgtggaggatgactaaggacaacgtccctgagggtggcctgttggttacaggaagctgaggtttggaacagatccctgcgtgcaggtgagaacgatagaaatgggtgaaggaggctgagagagactcaggagcccctccccggcagctgaggtgacgagggtgcccctgaaggacgccctcagagcaaggtgctggggagggggcgggaagcggtggccctggggcctgctcaccgcacctctgtgccaagcaagctttgtgcttttagttttcaccgactctgcttctgtaaacgcagctggtgtctagggagtcacaatcggtccttgaaaagaggaggcttctctgaagggaatagtgtgtgtcaccaggaggtgtatgccggggatggggcacggcgtgcgtgcagggagaggggccagggggcacagtgtgcatgcaaagagaaggcccagggggcactgcatgcgtgcagggagaggagccagggaggaagcacgtgcgtgcagggagaggggccagagggcacagtctgtgtgcagggagaggggctgggggcacagcgtgcatgcaaagagaaggcctggggggcactgcatgcgtgcagggagaggggctgtggggaaacacagtctgcatgcagggagaggggccatggggcaccatctgtgtgcagggagaatggccgggggcagttgataggtgctgggggacaggcctaaaggcagttgtacttccgagagcttttcccggcagattcccagatctgcaggtgaatgaggtgaaggagcccaaaggggccgtctggatggcagctcctgaccttctccatctgtgctgctgccatgtcctctctaatgctccagccgggggtgctgcagatgctgggggacagaaaacagagccaatcaaatgcctggctttgcaaactggaaaaaaaagtccattgcttttgcaatttgaagggctcacaggagcagaaaattagtggtgaagagtgttataaaattattggatacagtgccttaacctgtaaacttgaagctgaaagtgtgccatgagaaaggtacaagcagaataaaaaatgcaccacctaatgctactgtaggtcctctgaataaataattgtaaagacatcttccttgggacatggataatagggaaaaatctcacagaaaactggggacattgcaaattttttttctcatatacagctttacaattcttgcatagcttatgcgaatttcttactataacttggggttgtaggtaatagtaaatctgaacgctgctgctgctgcttctttttttttcttgagacagattgttgctctgtcgcccaggctggagtgcagcagcacaatctgggctcactgcaatctccgcctcccagggtcaagcgattcttctgcctcagtctcccaagtagctgggattacaggcatgtgccaccatgcctggctaattttgtatttttagtagagatggggtttcaccatgttggccaggctggtctcaaactcctgacctcaggtgatctgcccgccttggcctcccaaagtgctgggattagaggcgtgagccactgtgccctactgaacgctgtttctagtgataacttgctgctctatttttagcaagtttactatatttatttactttattcaaccagcaattactgagaatctgctataggcaggttctgggaacacaggaaacaaagcaaacaacagaaataagaattggtcttttcctggtaggaatttaaaatctaatgggagcagcagcagtctctttccaaaaaaaaaaaagataaatgccacaggtgactctagagaacactgcttttgttctttgcacgtgaaggaaccaggctgcctgaggtgtagaggctccacacaccatgcagggcccgcacaggccccatttggcaggcagaggtagtccctgcccgttttcttgagggctggtggctgcctgggaaattcacctgacaccagattgaaatgcagatcggctttcatctgtttctggagctaaactctggcttcgtgcagcctgccacgcagctcggggactccggcgctgggcgaggaactcggctccaggtgcatcttgttaaaggctgagccccatttctcacatgcgttgcggaatcgaattctccgtgtaactcagaactcagagtgaatgagagatcgatacatgtagggttccagcaagggccgtgtctggtgagcaggggaaaaacacccctttttcatagaccagggactggcaacctttttctgaaaagggcagatagtgaatgttgtaggcttatggggccttgaggtctgtgcacctgctcacatctgccattgtagcaggaaaaaggccacagagaaaatggaatgagtgagtgtggctggtgccagttagcttaatttacaaagccagtcactgacctttacccagataactggactggtggacccaacatggaggggccatgagaccatgcggcccacctccctgtgttacctgtatgtaccacgttgtcagtatccacgcgtggatgggccatgagactgcggcccgcctccctgtgttacctgtatgtaccacgttgtcagtgtccacgtgtggaggggccatgagactgtgcggcccggctccctgtgttacctgtatgtaccacgttgtcagtatccacacgtggaggggccgtgagaccgtgcagcccgcttccctgtgttacctgtatgtaccgcgttatcagtatccacgcgtggagggggccgtgagactgtgtggcccgcctccctgtgttacctgtatgtaccgcgttgtcactatccactcgtgggggggccgtgagaccgtgcggcccgcctccctgtgttacctgtatgtaccgctttgtcagtatccacgcgtggaggggccgtgagactgcggcccgcctccctgtgttacctgcatgtaccgccttattagtattcatggacctttaactacaaatattctgtgatcgcttacctctgctgttcctcttctccttgtctatcttgatatagttatggactgattggatttatggaatggatatacaaacagttcaaaattcaaagctaagagaagaatacacagtggctgctgacctctgctagcggcttccctcctgggggtggcccactgcaaactccaccgtggccctggtgcatgtgacaagcaaatgcagtgatcagaggcttgactaaagcaggttttcacgttggcgacatttaggatggttagttttttaacacatttaaagcaaaggctttgttctctgttgagagtccaggaaaggatcctgacgtcttaagaatctgagtgacaaaatcggtgaacctgagtgaaaatttagaattggaagacatttctgttagcgtatcatcccgggtgctcctggacgcaggactctccacacgtctggttggcggtcagctcatttatgattgagcctgaccttatgacaggccacctcgttaacgattggatgttgtttttatcactctttactacgtttgctttcccacccctgctgtttccatgggtttatccgactctgcccactgaggcagcacagtcccctcgccttagcattgcgggcccagagtatctaacgcgtccgagtgcgaacagtgtcagaaggcactgaggcagcgcggttcccacctcggcattgcaggcccagagtatctaacgcgtctgcgtgtgaacagtgtcggaaggcactgaggcagcgcagtccccaccttggcattgcaggcccggagtgtcttactcatccgagtgtgaacaatgttggaaggcactgaggcagcacagtccccccacctcggcattgcggacctggagcatgtaacacgtctgagtgtgaacagcgtcagaaggcactgccgcagcgctcctgctatttttagcgtcctgctatctttagctgatagagtcaggccacggtgaggccagcaggccgctgaatctcacggaggcttcagaagttgtgatgctggcccctcagcttgcgggaactcttcgaggaaaaaaacgcgcaaactgttaatgttgtcagtgattaatctgattgaagcaaacggggaatggttgttacttttaaatggctcctgacaatggtttggccagggcttagatgtaacagtagtacttacttcttcaatagccaaagcttgaacttaggaaaatgggcagcataatttttagttacagatttgggagctggaagggtgcagagtctcatctctgtgtccatgctaagtgcagcttctcatgatggtggaggacgagtttcttcatgggaaataaaagagcccgtgggaacccttcgcagcggcccacatagaccacggaccacatgggagccgtggggctggtgacctggaagggggcatcctgcagtcacatggcaagggcgacctcggaggagtccaatctgccaggacatgggcagccgcagagcttctgtaccggaggcgatgctgttatctttatttgtgtggatctgtgattcatgtggatctgtgaagcctcatggaggccggaggacgggcattgatgagggaaggtgaggctggcaaattcctggcatggaacagtttgttctcaaagagccagctgagcccacagcagttttgtaatctggaacctcgtggctggcgtgtgatgtgatgaactcccctgctgatgcgtgaataactcctgacacatccctgttctctagtaacacggtgctaggcatgggacacacagccgcttcccaggaaactccacagcgtgagcaccgggtgcctgcgcaggtgcgggaggatggggctcccgtgcggagtctgcgcagggcctcctggtgaaattgcgcccttctggacacactgctgggtccatcacatgagcctaccatggcagatcatatatttgtaaatgaaccttaaaaggtgaggtttttaggctttcagatatttggggggaaagggtagaaaactgcccccaggaggcctgaatgaatcaagtcgtgctgcagagcagggaggattttcggaattagatgccgctgtgacggcagcaggtcggtggcagggtgggaggaagtgtgtcttcgggcagcactttctcatgggacaggtgttctttccgtagacagtctatttatttatttattttttgagacggagtcttgctaagttacccaggctggagtgctgtggcgcgatctctgctcatttgaacctctgcctcctgggctcaagtgattctcctgcctcagcctcctgagtagctgggattacaggtgcccacaccacgcccagataatttttgtatttgtagtagagacagggtttcaccatgttggccaggctggtctggaactcctgacctccagtgatccaccctcctcagcctccaaaatgctccagtgatccgcctgccttagcctcccaaagtgctgggattacaggcatgagctactgtgtccggcctcctatacagtctttcttagataaaacaggaagggttagctttattactaaagaaaacagattagctttattactaaagaaaacagaaatgccatctaagcagaaatagaaactaagtatcagaactcccttgatgactgcgccacacacttcattcccactccattcccagccaggagtccacagcccaagtctcattccagccagctgaggttctgtagttgataatcaattgcacggcactcactagttttctgttttatttatgagtaaagttttaagtgtgacgatgtaagtgaaaattcaagagtgggaactggatgtgaatcaactcattgcctatcgatggcccagcaggtactgctgtccccaaggaaggtgcgggaggagacagtaggtgtcacttatgttcatggctgtcccacgaggcctgtcacgtcctatcctatgagatccatcacatcttatcctgtgagacttacaacaacctatgctacgaacatatcacatcctatccttcaaaaaatatcccatcttgccctacaagcctctaggagcaggtgcagaagtgcacgtgaggaagggagcagtggcctgaggggtgcatgggacagtggcagtcccagcagtgtgtggggtaaacctactagatggtggagaaatgggggcgggggggggcaggtggcccatgttccggtgtgggaaggcatagcgtgcgggcactggcctccccaggtgagacagtggcccgcagcggcatcctgtgcatacctgcacctacggtgttgtgcagtgagtaaaaggctccggcatgagttcggtcctgtcgggaagttggttgggagttttagggacgtggcaataactgcgtcccaagcagctcctccattcagggcccgtgacggtctggagtcggaggagccacagaccaccttctggttcctccattgcactcaggtgggcaactttaaacgtttctaagttaaaacaaagtctaacttactgtagaatagaatgaaaacttggcataaaaatgtaagaatatatacaaaaactaaaagaaataatgtgttgtagtgggtgattagaggtcctgggccagtgagtctctctctccccatcctcttctttcctactccctgcttccctctctctccagctgtgtctctctccatctctctctctccagctctgtctctctccagctccatctctctccagctccatctctctccagctgcatctctctgcattttctcttctggcctttgtggttaaacttgagaataaaaataaaagcacttacaaatttattttatgaccatatctgcctctagtttgtttgtttgtttatttattttgagacagagtctcgctttgttgcccaggccggagtggagtggtgcgatctcggctcactgcaacctccccctcccaggttcaagcgattcttacgcctcatcctcccgagtatctgggactgcaggcgcacgccaccatgcctggctagtttttatatttttttgtcgagatggggtttcgccatgttggccaggctggtcttgaactcccgacctcaggtgattcacctgcctcggcctcccaaggtgctgtgattacaggtgtgagtcactgcacctggcctctgcctctagtttaattagtgcttatgttttatttaggtggcaggtgttgaattacagttttgattaaaacccttctattttagagttggagcaatagacacaggtttacaagttatttatataaagatttctgtacatgtttttgttctaaaaatacatttcattgttaaattgggcattagaagcacaatgatacatttcttaaagaactaattatacaggcaaacactattaatatttaacaaggcatctgtttttctccttgtccatgcgcttccccacaaaagcagagaggggaagctgaatatggcttgggggcacacggcgcggggcacagcatctccactttacttaaagatgagcagtgggtggaggattcaggcgcactgagcatgcagggcactcacaggatcctgctgtgcagatgcaggatccgcagtggggacaggatggataggactgtagagcttgtttgatgcagagattctaggcaggaatgtgaaagcctcaggtgttaagtttcactgtttttactaacactggatattaacaatttaaaacacctttgacatattttcatttgtatttcatgtcttgatggttaagagttgagctgttgagcctagttctattgttgactggctttctgctgaaaagctaacaggttaaatggtttgttaaatccagaaccttcgaggtaggcccacattatcacattaaactcacaagtgtggatcacaagtgaaggagtattgcacagaatgttttttcctttccttataaaatgcattagtctatgcaaatacaactttaggggaaaaataatatatttaaaatatattaagtttatcctatatttatatattttggtttctgttttgtctaagagctccagaaattccttgctgacattgtccaagtcagtggacagccaaatctcatttttctgactcaattctgtgattcttatcttcagagctgcttggattatttagcagtggttctctctttccttttctttccaatcttaaattagcagttctatgtttcactgatcggtcatttgtcaaacaaatactcattgagtttctattaataccattacaccaggcttttgtgttacttagttatcgagaaaatgatttcatccgggttaatgagctaaaatggcacagtagacagtgagccaccaggagagtgagtgctcctgggcttcactaactgtgctgcttccagctgataatgaggttttgtttgagaaactaagccctctggacgtggcctcccagcaggatggacatgcgagctcagctgttcccctgcttggcttttaattggtgctgggatgaggcaggtgcagggggcgggggtgaggggcagggaaagaaccttgaaatacttgagaaaagggcctttcctgcaacttggttaagaaaccgttgcaagcacaataatattgggctgaaagaggttggtcttcatggaattttagtaacccaaagtttaagacaggagtgaaatttcttgtctttatttctaatttgcaaactggaaaagtgagtctgggcagaaattgggtttctagtgcctgtcagtgacctcagccatcaaccgccgaggaactgcaggctgcccggagagtcaaaccctgactgtatcggactcaaaaaataaatatcagtgacaaatgcagacttcgaaaatgtgacccaatgctttcacactcctgtacttttcataaattagtggttttcaaagtggatagcaatatgaatatttctctttttcagtgatactgtttttctcgacaccacaaaactatcctataccctgtacttggctcacctgccctcatagccgcacttgggggggatcactatggtgcctggtggggtggcaggtgcctcctcctgaggcagcaaccccaaaaggtaagcatggttctgcccacgcccccatttccagcaggccttgtcagcggtaggaccatgaataccgactggtgagggggagtgccaggagacagagaagacggctgcccactggggcttctagtctcccttccaggaaggatttgaagtagctgacacaattaaacacaacataaaagaggactttttttaaaaaaagaaaaaagctgagaaaaatgttagcagacgtctgggatggatttagctgtgcattttctggcagtgaaggtaaaaaaggaaatctccatctgggtctaataaaaggcactccatagatacactggggaaaataaactttttcattcaagggagaattaattatagaaggacactgggaaatctaaataccataaacgggttttgctaacgtttcaagaatgttgagattgagtttttttccgttaaataaaaagttgatttctttgagtgccccgaaagccgggcattgcatggcagcccagcgatatagccttccgcgtggctgatggaggctgtttccaattgcctgagctcacacaagggcaggaattacagaacccacagccgtgatttctacgggtttgtcaacagaactccttctcaaagcattttatttgtataaatttataaattccaagtcttaacattacttagtatgaattcagtgaaaaagtaagactttagtgaacacaaaatctgaagcgagaggttgtgatgcttgctggagtcaatctgttcatttccaggttctgttttggttgcattgtgtagaggaaaccttcactcgcgcagataagaagtgctaagtggtcacagggcttagaatcctgcaccgtgcatcctcaaatagctccagaaccttgacagaggcattacagagttgaactcaccagccattgcgtgattcacctaacatcgcttacatttctcagtgtaaagttaagcagcgcaccaaacctttcagcagtcgctaagttgggctcagcactaaggagcacctgacttttccgaggtgcatccataagtcccatggtccgtgtgctcctccatgcctccgtgtgcgcatgctctgctgccgggccacctcccgcacctccgtctgcacatgcccagagcctatgcagagcctccgtatgcgcatgctcagagcaggtgcagggcctcctcccgtgcctttgtgttcgcgtgcccagagcaggtgcagagtccctttgaccttgcttaaggagcgcacaggtgtggaccatggtgccaggatgcgggttgtgagggtagcatggacagagggtgagaactcgagccctgatccaaccacactgtttgaacttgaccctatcacttagcacatgttttaactttggcacgttatctattttttcttagcttcagtttgcttgtctctaaaacggggattatatggcaccttcatgggagttgcatgatgatcaataagaaacccatatagagctgctaaatagtgtctgacacataggaacacacacaaaaaatcagctaactttataggaaaagatgttatcactgtgttttctggggtggcctggagctttcctcctgcggtagcatctcagcaacgaagcgttatcttacatgtgcttcacgttctacaatataagggggcctgagccactgatgctgttcagccaggagcaccaggcaggtgaaagagaagagagctgctgatgagaagtcctgatctttctcctcccagttaaattaaaatgtgtgttgtttccagcatgccagaattatatttataatacaattgagtgtgcaggttttctatattgagtacattttggaaatctgtcccctagtggcatgcatctaatgcactgtccattttaggcagagatgacaacaaacaaatatattactaaacttacattgagactaaaattaaaattaaactagatttaaattaaaaacttttgtgcttcaaaggacgccattatgaaattgaaaagaaaatccacaggacgggagagaggattggcagagcgcaggtctggtcagggatttgtatccagggcagcgttggaaggctgtggagctgtgggaacccatatgtgcctctggtgggagcattcaaaaccatttcagaaaactgtttggcagtttccagtaaatatatgctcctggaaacaacccacatgtctatcaacagtagaaaaaaacaaaaataaatcgtgaaatgttcacattaaataaaatgaacaaacaacatgggtgacttttgacagcctaaacaaggaaaagaagccagacaggaagagtatgttataagattcattgatgtgaggttcaaagctgggcactcctgggggatggaggcagaggtcaaagtggatgagaccttggcaggtgggagggtccacagtcacaacaggggcatctcagatgctggtgatgctgtgtttcttggccctgatgacagtggttacccaggtgaaggctgagccgcacacccagggcaggttaggcactttgtgagcaagttatccttcggtgaaatgttcgttaaaacagatcatgactcatgtggcgttaaatattacagggaaacctccagaagggatgggcttccagggacggtttggcaagggccagctatgctgagctgccgtggtcataaagaccagaaggagaggagggaaggggctgggctgaggaacagcatgggcagaggccccaagacaggactcagcttggctgtgtctgaggagccatcagacagggaggtcaccgagggcctcgtctgccttctccttttatctgagtggatggaaacctcggagggttttgagaagaggacaaaacaagcaggctgtaaggttacatggtcactctggtttgtattgagaataactgcagtgggctcagtggtgagctcaggtggaagcagctccgtgtcttggattgacaaacacaggtttgctgccagtgctacagcggtcagcctggtcctgtgcctccataactggcctctctgctttttcgtggtgcagggaaatgctgcttccggaagcccattcatagtctcctctgtagcctggaattgacccttgaagagttcacaggtcctctccctcagcccttttacttttttctgaacccaagctatggtcagaagcactcaacattcccatatctgttcagcgccggcttcccaaagctctttgcctcgggttgaaatagctccaacttgggctgggcacagtggcttatgcctataatcctagcactttgggaggctgaggcaggcagatcatttgaggtcagaagtttgagaccagcctggccaaacatggtgaaaccccgtctctactaaaaatacaaaaattagccaggtgtgttggtgggtgcctgtaatcccagctactcgggaggctgaggcaggagaattgcttgcacccaggaagcagaggttgcagtgaattgagatcacgccacggcactccaacctggacgacaagagtgaaacaccgtctcaaaaagaaaagaaaagaaatagctccaacttaaagtgttagcgactcagaaaagtatttacccctctgctcgtagagtattgaacgaacctgagattattgccataatttactgcaaataggaaaagcaatgtgagctggggacattttgcttgtttcttctcaccagagcagtgccgcagataagccgactggcttcatgcagcgcagagctcctttaagcattgtgggacaggtggatctgccaagcaggagctttctgtgctggcccaaggcaatgtggctcagttctagcccctctgaccctattctgctgccggtatgcccccacccacctgcctccccgtccccctcctcctcccccaggtcccagccgtcagccgtgttgttttgctcactgtgggatgactgttcccatagaggctgtttctcctgccccgcccctacagagcctcccttctcgtgtcccactgtgagtctaggttggcccatgcagttctggggcctgctgtatgtcttcttcccctagtgaaacagcagattccttggggtaggaagtggcgtctcacctgtctcacctactccatggagcctagcagaggactaagtatactgcagatacttaggacttactttattgagttgactgcagaaaacacagggacaaatcatggtgaccttggattaggcgatcttttcttagatatggtataaaaagcataagcaaccaaagaaaaagatagataaattggactagattaaaattaaagacttttgttcctcaaaggacaccattacgaaagtgaaaagaaaatccacagaatgggagagaagattggcagagagtggctctggtcaggcatttgcatccagaagacacaaagaactctgtcaactcataacaaaatgatgctctaatctaaccgtgggcaaaagattttaattggtgttttaccaaggaggaatacaaagggccagccaatgaatgaaaagatggtcaacattatttgcatttatttacattagagaaatgcaaataaaaactttatgcttcatacccactaagagggctgtaataaaaaagacagacaatgaagaggtgttaaggaggatgtagaggagttggaagtcttgtgcattgctggtttggaatgtaaaatggtgaagctgctcggaaacacttggcaattcctcgaaatacaggaatatgaagagttaccaatatgccctgcaattccacgcctaaatatgtcctcaaagcattgaaaacacgcgtccacacggaaactttcacacagatgttcttgtgttcttggcagcattattcatcatagccaaagagcggaagcatctcagatgcccatcagtagacgaatgggtaaacaatgtgatttatccttacaatggagtagtattcagccacaaaaaggaacgaagtactgatttatgtacaccatgaatgaactttgaaagcatgatgctaagtgaaggaagctagaaataaaaggccacacgttgtatgattctatttatgtgacatgtccagaactggcaaatttgtagggacagaaagtagattaatggttggcaggggctgggggagggggcgtgggagcgactgtaggtcttgtgccttcttgggatgatgaaaatgctctagaattagatggtggtgacgattgtgcaattctgtaaatgaactaaaaaaccactgaattgtacattgtaaagggtgaattttatagcatgtgaattctctctctctctctctctctctatatatatatatatatatatagatatctatatgtatatatatttttttgagacggagtctcgctctgttgcccaggctggagtggaatggtgctatctcggctcattgcaacctcatcccaggttcaagtgattctcctgcctcagcctcctgagtagctgggattactggcgcaccaccacacccggctaattttgtatttttagtagagacagggtttcgccatgttggccaggctggtcttgaactcctgacctcaggtgatccacccacctcagcctcccaaagtgctgggattccaggcatgagctactgtctcggcccaaatctttcttaagttgtgtctggcctttggcagaaatagccacaaagccagggtaggaacgttttactcttcaagtgatgatggcatccgataaccttttagagggaggttttaaaatgcaacgtagcccagggctccagaaaaagacctgcacggagaagagagggctttgtagctctcagcagacaaggcgtgctgcccagggagctcagttttcactgtaactgggttgcactgtcaccaccggtctcctccccacagatcccacgggaggacttcctgttgtgtaacatccagagaagcttctggaagctggggagctctggctgtgcaggaaagatctagctgttttgttgcagaaggcgctcgccatcagggtcccgggtcgttgacccacccacttccgctgctgacgtcatgctgcgctcagcgttattcagggcggaattttcactcgtcagaaatggatttgggagcattttaaaatagtgcgttttcagaatttttgtggttgtctgagaaccaaacaagcaaggcacagcacgggtctgaatcacttacatgggccttgtttgcttgtttaggtcagtgtttctaatactttatatttctaatgtaaagccaaagaaagccacaaagagatttaagatgtgggtggaagtgctctgtttgctgtgtctgtgtttccacagagctttatgtttttttgggaggctggggactggggaggtgagggacatggagctgtagtcgggagggttgggcagccacactgggggtggagaaggtggcccggtccctgcggggctgtggggcaggagctgtagtcgggagggttgggcagccacaccagggatggagaaggtggcctggtccctgcggggctgtggggcagaagctgtagtcgggagggttgggcagccacactggggtggagaaggtggcccggtccctgcggggctgtggggcagatgaactctctgggggcacctgtcatggtggagggcagagaacaatggtccagcaccattaccctggcctgggctgctccaggctgcccgttgcatcagcggtggagggtggaggcactagccaactggggcaggccatagcctcactgtgggctggagactccgtccctgtgctgatctgggacaggtgggctgcagggagactcaggggcccgtgctccttagtcgtttgttcccgccaagccacctctctctctgcccatattcagtggatgccggctgtttttgtttgtggctctctctgcactgttttccatctgcctctgtgcatcagggcctttaatgttttaccgggtattttgagcctcacagtgactgttccgggtccaggggagtaaagagtgctctgctccctgtggaggtgtacttctcttcccccaaagattgctcctcttccccagagcgctcctcttcctccatagactgctccccttccccacggaagagcgctccccttccccacggaagagtggttcccccaccacagaagagtggtccccctccccacagaagagtgctccccttcccccacaggggagtgctccccctccccacagtgcgcttttctcacgtgtcctaagtatgggtggtgcggggtgaacgcattgtccacagggagcagccacccctggaggcaaacaggaacactcattcttgatctagatggtgccaggttgaaaggaggtttttaaaataagtgcaggctcatgtagagatggctgctgcctggcctgatgttgcatgggaaatgcagcatgggaacccttggggggtgggggagacacctcctgtggaagggggtgctgtcctgtcacctcccatgtcgagttgcgcctgagacactagtgtctgtgctgctcagcatgtggtcccacggaggagcccctgcgggcgctggtctctgtgggagactggggtgtgagcacgcggtgtcacaggtcgtgtgtggggggacttatgacaggtgctgtctgatttcgtagtctggatgttcattagcattaatttcaggcactggacgaccaaaagtgagaaaagggaaaacctgagaatttgctcagctgtgtaaaaatgatgccacttacgataattctgcgaagctaccgcttatgccagctacctgtggagcgcaacatcggcttcctgaggcagtctcagcctgctccattttatttcacttagatggtatcccccgtgtgtgacggccggccttcgccctgtgcctccccgcagtgtggctggatctcagggggctcggacacgtgctcagactgaaggtcagaaagagcattttccattctgacccctgacaatggcaagactttccacaggtagacacctgtttttccaatccttactgtgtagcgagactttctgcagatagacacctgtttttccttattgtgtacgtgggcagaggggagaggcactcactcaagaatttcctagatgtctgatacagaactcaccctgtgaatctagttaggtttctaagcatcagtagcacagtgtatgacagcacatgtgccagcagacctcacctgtgcagagggttctatggagaggcgaagtcgttagcctgctgtggcttctctggggaagattcagactggcagacagttgctccagtgccctcatccttgatctgcttactccctgtgatgaacacatgtattttgtgagatgtctgccacatgggtgggaaacgtgtattttcaccatcgtgaaaaaaatatggctgtattcaatagcattgctggaaaatagaatgggctgagggaggtttttaagggtgtggttattgggcagatgttgcaggttcctgctacagtgtgatgatctgtgcagatgttgtaggttcctgctagcactgacggcataggcaggtgttgtatgttcctgcaggttcctgctagcactgatggcataggcaggtgttgtaggttcctgctacagtgtgtgataacctgtgcagatgttgtaggttcctgctagcgttgacggcataggcaggtgttgtaggttcctgctacagtgtgatgacctgtgtagatgctgtaggttcctgctagcactgacggcataggcaggtgttgtaggttcctgctagagtgtgataacctgtgcgatgttgcaggttcctgctagcactgacagcataggcaggtgttgtaggttcctgctagagttgacggcttaggcagatgtaggttcctttgagctcaggaatgtaacacagtaagcttaaggtaacctatacagcttcaggaaaagaggattggttgtttatttcctgtggtctcagggtgtccttccctggagtttagtataggcccatccaccatccagaggcttcattttgaatttggggagtttgctaagaactttaaccaggtctgaaggaaaaaggggagttgtgcatttgtaaagtatttggttttgattgaaccaacagtgcaagttacaggttaagccagttttcaggttagaatatttcctgctggtatggacgtggtcattttagtcatcatactatgacggctgagctgcgtgtccagctgcggtgagtgggccacttgcctctttcacgtaaggaaggcttcctcttcacgcatttgtcagtggtcaagaaagttaaaacaagaaggcaggagaatgtcgctgtcctcccagcacccggtttgggacggtctgggagggtgtgatggagtgcagtgttctgtatgttgatgtgtgttgacggatttctctgtcctcccggcacccggcttgggacggtctgggagggtgtgatggagtatggtgttctgtatattgatgtgtgttgatggatttttctttcctcccggcacccggcttcggatggtctgggagggtgtgatggagtgcagtgttctgtatgttgatgtgtgttgatggatttctctgagtggcgatttcagggatgcttatttctgtccagtgaatctcagacatggggagcctaatcttcacatttggtgactctccctggcagcttctcacgtgaaagctgattgttagctgctggtgcctccctccccggccctctgctcaccacctgccctcacgggtgagccgctgcacttctcgggctcgttggcctgcagtcagctctcggctcggtgctgtggaggtgttttgcttttgccaggaaagtgcatcctccacaccttccctcctggtcgactcttagtcacccggctggtgtgtaaagcacagagtgctctgaacagtgttccaagtgtgtcccaagttaaaacgttgtggttagccaactccagttcaaattccttccctacttcatgtaagatatgtgagctctccagcctcaatttcttcaactgggaaatgaaaataacagggatgtccctttcaaacaatggtgagttttaaatgtgatcatacatctgggagtcttaaaatagtacgtggcacacagtgattcatcagaaaatgtgaggattttactgatggggtaattgggcactggatagctaagacttactagtttcgagataagttagtagcataataataataactattactattatttgagacggagtcttactctgttgctgaggctggagtgcagtggtgccatctcggctcactgcaatctccgcttcctgggttcaagcaattctcctgcctcagcctcccaagtagctgagactacaggcgcccgctaccacgcctggctaatttttgtatttttagtagagacagggtttcaccatgttggccaggctggtcttgaactcctgacctcaggtgattcacccacctgggcctcccaaagtgtggggattacaggcgtgagccaccgccccagcccataatcagaattagaatgtagctatttaaaattttatcccagtgttttaaagtatgtttagagtattagtaccacccaaataaataatcattcattcttttattcagttggtaataatgtgaatgtttagtgagtactaagctcttactgtgtaccctagtatgaagagaataaaaggatgcacaataaatatacatcccctaatcagagacagtttcaaattttagtttataatttgtaggtgttcctcctcacagctatatattagaatcatatgagaatgagtgaggaaagccaaaaaaacaaaaggatcatcgagaagcataaaacaaaaagattaggagcggtgagaggcaggacccaggcttggtattgttatgttttaaataattttctaaagttttgaattgtaaaaaaagcatgcatggaactgaccatcatagccatgttaagtgtacagttcagcagtattgagcacctccacattgtcgtgcagcggaactccagaaattctccgtcttgcaaaactcagcctctgggccgttaaactaggtgtccccacctcccctcccccaggccctggtgaccaccgttctgctttctctgtctgtgattttgaccactttagatacgtcatttcagtggactcatcctgtgtcgttttgtggcggaatcacgttctgttgtgtgtatacaccacgtttttcttgtccgttcacctgtgatggactcttgggcgtctgccgtaggccgctgtgaatgctggcggcggtgatcgtgtgctgacgtctcctccacgtactgagttcgtgtcttttggatgcgcgcccagaggtggcactgctggatcctgtgctgggtcatacctatgtttaattctctgaggaacctccgtgctgtctccatagcagccgtgtcgtttcacacttgcaccaacagtgcacagggctccggttccccacgtcctcaccgggtaactggggttccggctccccacgtcctccccgggtaactggggttccggttccccacgtcctcaccgggtaactggggttccggctccccgcgtcctccccgggtaactggggctctggttccccacgtcctcaccggcacttggcactgtctagtgttttggtagcagccatcctgctccgtgtaggtagtatctcattgtggggttttgttgttgttttttagagacagcacctcgctctcttacccaggctggagtgcagtggcacaaccatacctcactgcagcttcgacctcctgggctcaagcgatcctcccacctcagtctccccagtagctgggatcacaggcgtgcaccaccatgcctggctaattaaaaaaaaaaaaaaaaaaagacaactttttttggagagggagggtctcattaggttgctcaggctggtattgaactcaagtgatcctcctacgttgacctccctaagtgctgggattacagctgtgagctgctgtgcctggcctcattgtggttttaatttgagcacttttcatctccttattagaccttcttgctacaaatgtctattgaggttctttgcctattttaaaatcgggtaattgatttttttctgtcattggcttgcattggcatagtttttttttttttaacttcctaagtggtactgacgtgtggccggggtgaaaacctctggcctaggtatggaacaggtagagggtgttaccgagatgatgagtaggagtgttcagaaggtggtagggatcacccgtctgctccggagggatcgcttgttgagatgagatgaacgctgcacttgtggacatgcagacgtcttgcaaacaagtggggtcaggatgtggtactcaggtgcagcctcagggccagggtggattcgggagcgtaagggaagggactgttgctggaaagaaaagtaggtattgaaggaggtggaggcaaaacagtccctgcacctctccacctgcagactcagctgccgccactgcagcctcccggagcttggcgtccacgggtaaggacctccctcagcttgtgggcaacatgtcttcagccagcgtgccaagaaactgcaaaggcaaaatagtgtttttggcagtgtttcaaagaaacagagagtgcattatgtgcacattcaatagccctactgtagctttttagcaaattacaaaaagtaacacagggcctggtatggtggctcatgcttgtaatccctgcactttgggaggccaaggccggcggatcacttgaggtcaggagttcgagaccggcctggccaacatggggaaaccccatctctactaaaagtacaaaaattagccaggcattgtggtgcacgcctgtaatcccagctactcgggaggctgaggcaggagaattgcttgaacctgggaggcggtggttgcagtgttcagagatcacgccattgcactccattcggacggacagagtgtaagactccatctcaaaaaaaaaacaaaacaaaacgaaggaacacaggattgtatgcagaaagaaagggtaaggcaaaattgaagggatgggatgaatttgagcatccctcattccaaaatcccaaatccaaaatgcccaaaaatctgaaacttttcaagcaccagcatgatgccacaagtggaaaattccattcataagctgttgacacaaactttcatgcataaaattatttaaaatattgtataaaattaccatcaggctgtgtgtatgaggtgtgtgtgaaacacaaatgaattttgtgtttagatttgggtctcatcacaaggtatctcatgatgcatatgcaaatgtcccaaaatccaaagcacatctggtcccaagcattttggataagggctactcaacctgtatttatagacagaagctagaaggcatttgtgggactctcaaactaagatgggtcttcattaccttctaactttggcgatcatgtagtagatatatttattctgagaaacaatcataaatataaatgcatttctttcatttctttttattgagatgggatcttgctctgttgtgcaggctggagagcaatagcatgatctcagcttactgcagcctccgcctcctgggctcaagcaatcctcccatctcagcctccagagtagctgagactgtaggtatgcgctcccacacccagccaatttttgtattctttgtagagacagggttctgctctgtcacccaggctggtctcagactcctggactcatgcgatccattcgccgaggcctccaaaagtgctgggattacaagcgtgagccaccacgcccggcctgaatgcaatttttacattatagtcatttatgcttcttcctgttaatccgaaataagcaattgtgtttttgctagccagctacagagataatgtaaaaaatgttttaaaaccatattatcaagcagaaaatggtgcttgtagatcaatatcttcaacagtttcccattaaaatttcagtatgtggtcggatctaactactggaggagcttcgaggtcatgccagtgtccttaacactcgcgtttgttaaagacagccactgccgccctttgcggctatgtgcctcacctcttccacatcacggagcacacacagaatgttgccatttgagccatgcactgggtcacgggtgggctgggcgtcagggtgcccacagctggagtgacctacagagcccagctctgctggggccccagggcaggtggctgcagcgtccccagcggcctccctggcgtgccacagcatgaggctgtctgctctggtggatgccgtgggccatggatgcgcctccatctccgcacagtgcagccggtctagctccctaagccgccaggctctgtgcccaactcaagcagcagccaagtggagagagctggaatgtgtcatccctggtcccagccttctatttcttaatagaaattaagaacttctgccacgcttaaaagaataagggaaactttcatttcgtagcattctaacttttattttaaaagtctttcactattgaatgactttcctgaattaactacattctcaaaaatattcccagcattggtcaaaggcttaaggaattttttactaaaagttgcaacttgttgagtattaaaagtcttacagataaaaataagcaaaggagatttacagaactcagaaaagaagagaagacacagatatgctttggggaaagtactgaacctagatattaatcagagaaaagctgggaacgttgattcctaggaatgtggatactgtgttaggaagagaaagggaaggagagtctccatcctcccacgtggggacacgtctgctgaaggatgcggggttgaatccccttcagcctctcgtgaatttctgtcttagggaaggagaatctccatcctcccacgtggggacacgcctgctgaaggatgcggggttgaatccccttcagcctctcgtgaatttctgtcttagggaaggagagtctccatcctcccatgtggggacacgcctgctgaaggacgcggggttgaatcccccttcagcctctcgtgaatttctgtcttagggaaggagagtctccatcctcccacgtggggacatgcctgctgaaggaagcggggttgaatcccccttcagcctctcgtgaatttctgtcttagggaaggagagtctccatcctcccacgtggggacacgcctgctgaaggatgcggggttgagtccccttcagcctctcgtgaatttctgtcttagggaaggagagtctccatcctcccacgtggggacacgcctgctgaaggatgcggggttgagtccccttcagcctctcgtgaatttctgtcttagggaaggagagtctccatcctcccacgtggggacacgcctgctgaaggatgcggggttgagtccccttcagcctctcgtgaatttctgtcttagggaaggagagtctccatcctcccacgtggggacacgcctgctgaaggatgcgggtttgaatccccttcagcctctcgtgaatttctgtcttagggaaggagagtctccatcctcccacgtggggacacgcctgctgaaggacgcggggttgaatccctcttcagcctctcgtgaatttctgtcttagggaaggagagtctccatcctcccacgtggggacacgcctgctgaaggatgcgggtttgaatccccttcagcctctcgtgaatttctgtcttagggaaggagagtctccatcctcccacgtggggacacgcctgctgaaggacgcggggttgaatcccccttcagcctctcgtgaatttctcagtctttcagtccactttgctcactagtgtttactgcactaggttttcgtttgggagaataacaaagcctcctttgagttcggggaaggttggaagtggaagctgcctgtttgggagagatgacttctgacctcttctgggtcacgtagcttccccctgcctttttataacaagtagaattgttatgataattaccgtcatcatgatatttttatttatcattatcctctccttcatcaaacatttatagagcaattaattctgtgccattctaacttcatcggtgtaatgtcatcatgaggtacaatagcattattattcccactttagagatgggaattgaggcataacacgtagacggctgcccactgtggaggagctgaaccttggcggtggggccgcagggtctctctgctccctgtgggaccgcccttttctcactgttgtgagcagggctgttcctttccagcaagatgaacaccggtgtaagcgcgtcttcgtgtccttccatggatgtttgtagaggtggagctactgtgtcgaaaggcatgtgtcttggtattgtttgtttactgctaaattgccaccgtacgtttttcttccatgaacagcctgcgaatacaccctgccatttgtttattgggctgttcatttttttctcttgatttgtgagagctctttttatattaaataaattagcccttgccaggtacagtgtggctgatgcctgtaaacccagcactttgggaggctgagttgggtggattgtttgaggccagcaatttgagaccagcctggccaacatggtgaaaccccatctctattaaaaatacaaaaattagccggatgtggtgacgcgcacctgtaatcccagctactagggaggctgaggcatgagaatcacttgaacccggaaggtggaggttgcagtgagccgagatcgcaccagtgcacttcagcctgggcgacagtgaggctccatctcaaaaacaaaacaaaacaaaacaaaaaaaaaaacagacattggccctttgactgatatgcatactgcagataatcccccccccctttttttgagacagggtcttactctgtcacccaggctggagtgcagtgctgtgatcccgcgtcactgcagcctggttccagtgattctcccgcctcagagtgctgggactacaggcatcagccactgtgactggcctcccagtttttcatttgtcttttgacattatggtatacacatacacacatgcgtgtgtgtaaatacacaaatatatatgtcattgcatctttgtaaataacgatgtggctaagtcgttcatcttttcctgagccctggagtgccccatgcttttaagggaccccttccccctttccacaggtataagcctttcaggaattggtctagtattggtcattcatttgttaggaaattaggatgtttcctttcttagggcctctcactgtaaaccctgtgtctgattatgtcataaatggcctgcctcgtttcaaggtgggggacgtctggcagcagagaagtcacaacagtgacggcggctgtgtcaggtggggatgtacatggagaagaaaatggggcaggacagtggggctcggggccgggaggagggcagcctttttctgtgctgcagtcaggaaggcctcctgcgaggacctgtttgagcacaggagtgacatgcagcgccattcccaaagtctcctgggttcccgggggtggagagtgcagctcaggagaatcctcccggcgggcgcccctgtgtggagcgggtacccctgtgcctggtgggcgcccctgtgcggagcgggctgtgagggacgggggctcctctttctgtccccacccccagcctgctgccatcgtcttcagcactgaatacgcgtccgtctgacgggttgtgtatttctatgtgagaaaattaatgaggaattttactgagagttgttctgaccatacaaacttaattgccctttcagtggaatgaaccacacatttctacaacacagaataccgtaatgtagtttaatagcctggaatagcagtaggatgccaagaatttactttccaccgccgataaccacagtgtccttgctggccatcctacaattgctaaagagaatgtagttgtcagtgtagcatcgggactttccaggaaagtcagccaggatgcacccacctgggagtggcttccgcctggcctccagcagctgccgaaggagccgtgtcctttggagttaatggagggactggctgtgtattcaatcacatatgctacatggtctacacatcctgcccacaggtgagttaacaggtcatcttttcatctttcactctaagtcttggggcaggaggtagaagtcagtgacatcaggcccagggtaaatgagtcagtgttcccaatgacatatacggtggcttacagttaccccggcccagacttttttctctctgtccctccgtccctttgtacctgcgtgttatgtggatggcgtgcatgtgtctgcacagctgcgtgatgttcccctgtggactcaacctcccccgcccctggccgccccacatcatggacagctgggctccaatcttctgcttttataaatagtgctgcagatgccttgtgagtacatcagctatatttctgcgaggacagctttgggatcgctttggagaagggagatttctgagaaggggggtacgtttgcggtttgctctgtcagtgccgtaggaggatgcctgttctccacctacctcgccagcagcctgcgctgcccggcttgccagcttctgggcctgcctaccgctgctggatgagatgccacgtcctgttgtggttttatcttgtacttctcctgctaacaggcaggttgagaatctttttatgtgtttaagtccatttgctgttcttttctcttttttgaaaaagaacagcttgtttatatcttttgcccatctttcatttgggttgtgtcttgaggagctctttatatacttctttattcttgatatttttgtgtgcctgattcctgacatatttattattaataataatggagcaataaagtgagtcacataaaaaaaataatggagacagtgattcccaggccaagagacacataaattatttaactgcagtcaaacaggcttatgttagaagcgctttttccaaaatgcaatgtagagttatttaaatttaaaaacatgctgaggaattaaagaaagaagccatctatgttcttcctggggcatcatttgagctcattacgtggacaccgctgcctctgaagctggttctgccacacgcctgacaggccgatcacagcctgaccttgaccaggcagcatccagggcgtcgctgtctcaccgtggtccccagtgttttgggattgaggaggggttcggcttcactctcttcagcgcctggggccttcatcctgagccgcagttggagccacggtccctgctgctgagatgtgagaaaggcctgcgctggggtctgggaaattcgttttctcgcagaaggcagagaaggccgtggaataacagggccgggttctcactggcgggactgttcacctctgcaatctgccccttagtgcctcggctgattcttggtctttggagacctggtccccagtcccacctctgcatatgcctccagataacgctcgccatgtttggggtgtatgagcatgctccttgcgttcactgtcacccaggcatccctcccagcggccctgtgaggcaggtgccaccccacagccctgctctcccgccgaggaaactgagtactgggctaattcacctgccaaagctgcatgcttggaaagtggtgcttagagccaggcaggactcactgcggctcctgtgctccacgctgcccccccgagaggcagaactttctcaggccaccttcagggcctcctggagaggttgagccccagactcctgggaagctgttcccccacgttctgtactccactcacaggtggacccatcgcctccaaagcctgtgggtctcattggctggaatgtctcacactgcagggcacctggccacccaggggcgtgtcacaaatgcgggcggggggcagggctccaccccacaagcctgctcaggaggcctctccacgatccacaatcgaccacctgtccatggagctccgggaatgctggcccggccccactgcagggcttccccagccctcctagacaccctgcacttgcccctcccgagcgcgtgtgcctgacctgctccgcggtgggcgcagagctcctgccgagggctggatggcgcggacctgggcatcgtggcctctgcagtgccagctgtgccctagtagccagggcgccgtcgtcagtccatggctcaggaggaccactgtgggccgatgaaatgcgactgtggacgaggaaattgtactttccgaacattttcacgtgtccccaaacagttacttttcttttgatttttttcaaccatttaaggacgtaaaagcattctcagttcatggaccacacagacaggctgcaggctgcacgtggactgggggcgggtctgtgggcctctgcttcacaggtcagaggtcgctgggttttcgtgtcttctgctttccattgcacagtcccaccctctccttggatcctagaactctgcccagcttggacagtctctctacacccagagaccggttttccgcttcttgtctgcgtcccttgtagcagtcacccacagggcgcttgccagaggacggccccgaactgcctatgggatccctccaggtcctctcagagcctccgtttcttgcatgtaaaattgacacaagaagagcctccctgcaggactgcagccaaggttagccagaaccatttccagtcacggaaccgtcactcagagcagctcccagaaccatttccaatcatggaagcgtcactcagagcggctcctagaaccatttccagtcagggaagcatcaatcagagcggctcccagaaccatttccggtcacggaaccatcactcagagcggctcccagaaccatttccggtcacggaagcggcactcagagcggctcccagaaccatttccggtcacggaagcggcactcagagcggctcccagaaccatttcccgtcacggaagcggcactcagagcggctcccagaaccatttccggtcacggaagcggcactcagagcggctcccagaaccatttcccgtcacggaagcggcactcagagcggctcccagaaccatttccggtcacggaagcggcactcagagcggctcccagaaccatttccggtcacggaaacggcactcagagcggctcccagaaccatttccggtcacggaagcgtcactcagagcagattctagaatcatttccagtcatggaagcattacttagagcagcgtaaatttcttagcaaccctggtgttgacatatgttgattataatgatatccttacaacattaaactacaaagccaaaaccaaaatacaaattaaataaaacttagtctgtgaaacaggttagattccaggcagggtctacgattctggctggctgtgcgaatcgacctctgaccccaaataactaagggtcatgtccatcgttgcggtgccttcaggaaaggggaaagtgtttttcctggcagttctttctctctagaccctgcaggccacctctctcacctgcgtgttgggcttcaggatcagggtccccttccagtccaggagaggcacctgtatctgccttctgcccagagtgtgtgtgcttgttgagtctgaccactcactggggcgctctcttggtaacagggtccctgtcacctagaccttacctcccagggtctagcggatggcggggcaggtgggggacggcacgaaaaacagcagacacgatttcagaccgctggtggcggctgagctcaggtgggcctcacctggagagcctggacggtgtcagaggtgcttcttggctggtggctgaggcttcccagatgcctctttgcctttcttctggggcacggccctctgcaccccagggcagcctgtgtggtgtctgacgatttccacagcagccagagcagcttgtggcagccggggcctgctcccagcgaggggtctgctcccagcacggggcctgctcccagcgcggggtctgctcccagcacgtggtctgctcccagcacggggcctgctcccagcgcggggcctgctcctaacgcatccactacatctagtaatttactagttgaaattgttacatactagttacatcgtttacaaaatgatcatatttgaagaattagctttctgtggatttagtccacattgatgtgagcacctactgtacatgagatagcatgctaagtgctttttatttatttaggcaaaagataaaaagttactgctgctacaatctgtagtgttactggtggagctatgcaagctcgtggatttagggagtccagcctacgagaatggccgcctgtgacagaaagcaggggcgagcgtctgggaatagagctgtgctcatggcagaacaaagacgtgctgtgtttctggcctttgtgttctctccagtggtgaacaaacataggaagctttcatcttcagagtaaacagaaattccaaacccatttcacgcagctttttctagaaggcaatgtgtttaatccacttgttttccgagtctcttagtgtcatcacgacttcctcttatgtcggtgttaattactgtcacaggtatttgcgaaaactacaaggtctattcaggtcaagactagcttctctatttccacattttactttgtgtttccacaactgggctgttttagacctctgcagaggagaactgatttgaatcgggaaaagcaggaggtcccctcacggaggtggacaggacgcccactcctttcccaggctggcctccttgtctcatccctcaagggaagggccaggggcacggaccagcaggccagttgttcagtgttcaggaatctcaggagacattgttaaacattaaattacaaaaacaattaagttgtattaaaaagaaaagtctttaaaaatacctactcaaaacgtctttcttcctgattgtcttgctgagtgtttcgctgcagtctgtgcttccaaggatggcgtcatgtgtgtgcggcagaaaggcgaggttctggcaagagtgagtggctttaggtctgcacgctgtgttaggggagccaggggccagcgtggtggggttcccagagagctgcttctgaacttccagaagcttccagggagtccacgccacatgcacgagtgcgggacacatgctactcaggttccatccaagtctcaacctttgtttttacactaaagacatttttgttgttgtttttgagacagagtcttgctctgttgccaggctggagtgcagtggcacgatctcggctcattgcaacctacacttcccaggttcaagcaattctcctgcctcaacctcccaactagctgggattacaggcacgcaccaccatgcctggctagtttttgtatttttagtagagacagggtttcaccatgttggccaggctggtctcgaactcctgacctcaggtgatccacccacccctgcctcccaaagtgctgggattacaggcttgagccaccacacctggccactaaggacatttgaagtaagaagaatggatcagtaaacacttcacatttctttttttttcttttttttcttttttttttgagacagagtctctctctgtcgcccaggctggagtgcagtggcacaatctcggctcactgcaagctctgcctcctgggttcacgacattctcctgcctcagcctcccgagtagctgggactacaggcgcccgccaccatgcccggctaattttttgtatttttagtagagatggggtttcaccgtgttagccaggatggtctcgatctcctgacctcatgatccgcccatctcggcctcccaaagtgctgggattacaggcgtgagccaccgctcccagcctacatttcttaaatctatcttgctagctcctctcgcacttgaaatcaaatactccagcaactaacacttgtgaagcatttttcaattttcctgcacagttacattatctcagaacggttcattaccgtggggtgtgtgctcttcataaatgcaaactgatgcagaagcagccaccagccaaaaaatcggctttagaacgtacagttttgtagccttcattttttacgttacattttcagttaagatgtgaaaatcattgaaccaattcatttaataaaaagttgagtaacatttatattttgtcacttccgtgggtaaacataacaccaaatacttctcttgtaaaaacagcaacgtgtgcagggtatagaaattcatccattcccctgtcccctcttatccttggtgaggactcagaggtttgctgcagaaacattcgtgcctgcaagcaaaggaaaggattagagcaggaggcggctgggggagctctgggtaactctgggtggatgaggccacatcctgcagccctctggtgaggttcttcctgttgcgtgctggggtttaaacctggatctgtcttgctctgaagcagaggctctcacctgggagcagtcttgttccagccacccgcaacacacttggcagagtccggagacttctgaccgtcatgacggtgggggttgctcccaagaccctgctctgaagacttcctaacctgcgtgctctttcaacaatagcgcgtggacacatttttaacctgagcgatgtaacaaattcagccagctgtgacgatgacttttcagttttacattaacagttcattgaacttatacaccagtaaaacttctgtatcactgtgaagggctcagcaaatgtactttcatttattgatgcagaaattggagattggtactctttatcatctgcttactgtgtaaaggatgtttccaggatgatctagaaggttttcagtgcctgttttgtaaacttttaatttttttaatagaacaattttattttttcctattttgccaagaagacagaatgaagtcaattccgaaatggcaaattcttctgtttataaaatgttataaacattttatcaccagataatcacgttaatttttgtaaacgcccttgggtaggttattcgcacaagttatgcatttttcatgtgagttgcttttcacttaaaaagtgcatgcaacagaaagcaccaccttgtcgaatcgatgtgctgagctaattcctgtcatcattaactggacaggaaccgaaggaagccgtctggcaatatgccttagggtggcagatgcagcttggggcttaaaggaagagaaatagaaagatttgactctgttgaagagcagtgtgtcatccccgagccggattccatttaacatcttataaacaaaacgtgagtcttttcatttctcagtcttccgtgtaagcaatccagaaagtgggaataaaagtaatttctcttgtttttctctaattattcaaaattcatagtagtacagttgaggaaggggcacctcgctgtgagtttcatgcttcccttcgtccaggcgctgctgtgtcctgggtgctgtgtgtatagggcccccgccgagtccagtgtgggtggcagagacgcatccagaagcccccagtaagtttagcattacccatttgggtgaggactatggaagaagagttcctggtgatttcagtaaaaaagatgttttacatgccagatagaaacatgctcaaatgataacaacatgatttgggttgggttattaagttgtttttttaatgttctttttaaaaaagatttgatctcaatgtaaacaaacttgcctaatttttttcagctagttcacacagacattcaatatgcattcatcagctggccctgttccctcttcttgctcagaggctggaagaacttcccatgcaccaggtcatgtttgcgtaaatataattacactgtattatgtaaatatagttaccagcatagttgttaacagttctgccaataaatatttattgctttgatctgaatttgataatcaaactgagatttaaaacacagtggcccgggaagaatcaaaggaaattgtaacgacacattcctcattccttcagtccacaggactttttagatgttgttgggaggtggagtggggatgatgaccccttagccacagtttccctttctgtagtttcagttacttgagataaccgaggtatgaaaatattaacaggaaaattccagaaataaacaattcccaagttttaacttgtgcacccttctggggagcgtggtgaaacctggctccgcctgctccatcgctccagggactgaaccctcccttcgtccagcgtctccaggctgcggacgctccccaccccccttatggcctctcggttatcagatccgtggtccaggggtcgcagtgctcgtgttcaaggaaccctcatttgacttcatcatggccccaaagcacaagagcagtgaggcaggcaatgcgggtacacctaagagaagccagaaggtgctcctttaagtgaaaagtgaaagttctcgacttaataaggaaaaagaaaatggtacgctcagcaatctcaggagatgttgttatgttgccaagatctccagtcagatggaatcttctctctgtgaaactgggaacagcatattgttataattgttctattttattattagttattgttaatctcttactgtgcctaatttataaattaaactttatcaggggtgtgtgttcatagggaaaacattgtgtccataggattcggtactctattggtttcaggaatgccctggggtcttggaagcacccctgaggataaaggggacatcgtgcacataggtttgggtactatctcggattcaggagtcccctggggtcttagaagcacccctgaggataaaggggacatcgtgcacataggtttgggtactatctcggattcaggaatctcctggggtcttggaggtgcccctgaggataagggggttgctgcacccacaccattgcacaccttagtctgtcacttgtcagccggtgtggccccggctggaacactgtggctcattctagctgtgcttttagaaaattcttgagacacacctgttcggccaggttgcatagtgaacctgcagcaggggtggggcctccccagggacattttggccaagctggcatcagctgccccaggcttacaggctgagtgtcacactcacctcctccctactggagtcaactgcctagccctgtgggtgtttgagttcgtgacctcgatggaagatagaaagcagcaggaaagacagtccctgttatcaaggcattgtaacctaaggtcatggagactcgtgcttatgaggtatatgtgggttttaagtgtgtgggaaaccttcacagggcagctaactgcagacctcccaaacccctcctcctcctctgccccagctcagggtgggcttctgggccgggtcctgctggcctcctatcacagcgaggttggaatctgtactgtggagactgtggcatttctgcatcattcctgatgcccgatgctgagattaggaaatcggtctctgaggctgagaggcagtttctcagagtatgagctgggacctgaaaggccgctgttggaaagacagcagcagcctgcaggcctttgtgagaactgtctctatgggcccccgagactgctgtgcgcctgatgcaacaatcacttgttgacaggaggtgtcttcagtcccggccgtggttcggaggagaccacgataaactccttcaggatactgctccatcattttcctcacccgaagataagagccagctacagacgggtgtgttgggtgtgacgcaggctggaaatgtgcagaagtggttcatttttcttccccttaactcccatgtccctgtggtaaaattccattgctgtaaagtcatgagctcgaaacccagttatgctcagctaagttccacggaataatttcattcaagatcataaaacgtaaaacatcacaaacaaaaagtgtctctttacaaatgctcacggtatgacgggcagccctccaggagtggcgtggaggccggggcactcagtcacgtgtgtgccgggagcacaggccttcctcgccgtgcgcggctcctgagctctgagtgaggcagacggtggcagtgacccatccttttctggtaacttcttaggggcaaagaataaaaccattcttcagtttgccccattttatgcctttaatttcaaaaagcatttgacagacgcagaaaagcgcatccctgagcagccctgcgcggtggctgagtgcctgcgtccagggagttgagtataaagatcttcttccttcgtgataatttctatgcctgcatgtcttaccatgcctgattatagcaaatcccaggtacacgttataacaacagctattacgttgtaaaccgaaaacaaaattctaagcccccaaccaacggaatggacctgcatcttggccaaggggaccccaaggaaatgggaaaggcgagttcaggctctgatgggaagaggggctcggacaggcctcatcccaccctcctccctttggaccagcagtgacattaaaacagagacctgagactgacaaaacagactctctgtaccagtaagtttccaacctgactctagtgtaccctcacatgaccgatagcaggccctgagagaaattatcttacctcaaaatacatttcattgacatattttgaaatggcccctcacagctgtctcttgtgggggaaatttgcattctgtagagaatccacttccctttccagctcttttctggagggtctgaacccttttaggctctgctaagagacactcaccatctcttctctctgaagcctgctacctggaggcatcctctacatggaggaaccttggcttccacgacctccttatcttaacttcacgctgacttcaactcttcgtgccgagcttcactctttcaagcagtcgccagtcaggaaatctttgaatccacctgtgacctggaggctcccccaccccctgcttggagatgttgcaccttcccaggccaaaccaacgccaccttccatgtgttggtttatgtctttgcctgtcacttctgtctccctaaaatgtgtcaaatcaagctgtgccccaaccgccttgggcacacgttctcaggacctcctggggccatgtcacaggccatggttttaactttggcaaaataaacccctaaattgattgagagccatttcagatactttttgatataaacgtaagttgtggaaagagatgacatgttttgtttggagtgttaccaggagttgttaggatcttggaaagtcacagcttgcagtagccctgtttggccgtagcccccataaaagcaggagtatctgtgtggggtgatggaaccctgaccctaggcgtcctggcacggtggtgcctctgcattcacggtgacatcgctcctggacacttcgcctctgacacctgcggggccccggcctgttccttataggctcatgcttgagtgtttatcacgacttagcttccttgtgtctgtcacagacagtgcactgtagtggtttgtagaagttcctggtgcaggtagccctgttccttacgatttcatggaatggggacattaggaatatttgtttcctgatggaggggttcctgggtctgtcagggttagaagacctcctgatgatgagcagaacagggcagggagaactctgtctggaaggtccaggcctgggctgggcccccaccctgcctcccatccagacagagtcccaggtggggcctgtgggctgtgactgctgcagggatggcattaaaggagccgaagaggacctggaagcccaggaagctggtgacgtgccccctgcatcaggctgtgcattaagtcaccgcattcaaagggtttgtgtccccttgatgggctcgtctgcctggggctggggctgcagtgggctggaagtgcagagtcctgcgttcacactggatggctactgaggtgaatgggacccaggcacgttttcttatggaatgtccacagcctggttgtttatcccagaagatcagtaatagtgacaccctctgaccatgagccaacctctttccttagctcagggcgctaccagtctgggctggtagaagccccgacacttgcctcactcggatccctggaggaggattatatgggcactggggcaaggcagggacatcttggcagcctccccaccgcacgcttttcttgcaagtcctttgaacggcacctgctccttagctgctgcctggcaactttgagggtttcagtgagatggggtgagtgcttcccagccagcaaagtgcgttgacagtggctggcttgccccccctcccccccgccccggctctggaagcttctccccctgggtcttccagtctcatgtctggacacagacaggagaggtgaggaggagcagcaggggtggcccgggcagttcctgtgacctggaggcctggcaagttgttctgacggccaggcccatccttggggaggcctctgaggacgcctggaaccccaggcccgccctgccttgttttctggtcctggcctgggggggtcgtggtctcgctggtgcagcctcctccgggcaggccccgcctctgctcccttcccctcactccatctgattcggccccgtttccttgtccactccacgttcttctgagcgtgtctctgggacatggttaaggttaagaagcggcctctgaacgagggagaatgtactgaaattgcctaagtgaacttcaaacacaggaagaagcgctcagtcgatgttcatggtgagaacgagggttgatcttttgaatgagtcacgggtttgagagagacctaagaaccattcgatctgaaaactagattcactttgaacaaaatatctcaggtgctaaatactccagttagtgtggggaaatgtctctgagaacgaaagctctgactgaccggagcctgctacagtggatctgaaagatgctcacgaataattctcgctgcagagcttagtaaaccaacaatacaaacgattttctgtaacgacctcccgtaaagcagccactcccctcacagcgctgagcaggcgtaaccgccagggtcctcccccttctgaagccgcggcttccttgcaggccggtgtccggcgttgatcctttaactgaccatgggcagttttagttcacgagtgtggattcttgggatacggtcgggggcggatccccctgtcacgggttgtagaaattgacgcagcgttttccgatgtgcccacctgcttgaggaaggaatagtggtggagacggacttcttattcttcagatgtgcccacctgcttgaggaaggaacggtggtggagacggacttcttattcttccgacgaggcaatctctgcctctccatgcaaggtcgtccaacctgccttattttgttgtttttctgttttcttttgttttaggcttttagcagcctgaagccatggtttttcatttctgtctctagtaataagcagaagagggatgagtaaggggctttactggcccaaccagaaacaaaaagtaagaacccaaaactgtattctctcctttggacacctgtgctggggggagaagcccctcacccagaggctgtcacagggcattcctgggaccctctctttcccagactgtcctccctgcagagctgcgtccagaaggtgcgtcccggctgaatctatactgcagcctcaggtcagtgactggcccggcagtgtcttctggggtcagggtccttgcaggaccaccgtcacatgcttgcatccgtctccctgtaagggaaggggaagggggagggtttccctcattggcttctgcccaccccccaggatgggggcagaagcacctgagggagtctgcctcttccctccatattcactgtgctgaaagctgcagcaggtgcccagttctgcaggaaacaggctttgaacatggattcctgtgaggaggatgtgggggcgttgggggccactgtgggaaggtggggagatgtgggggtgttgggggcccctgtgggaaggtggggagggtgtgggagtgctgggagcccctgtggaaaggtggggagatgtgggggtgttgggggcccctgtgggaaggtggggagggtgtgggagtgctgggagcccccgtggaaaggtggggaggatgtaggggtgttgggggccactgtgggaaggtggggaggatgtgggggcgttgggggcccctgtgggaaggtggggagatgtgggggtgttgggggcccctgtgggaaggtggggagggtgtgggagtgctgggagcccccgtggaaaggtggggaggatgtaggggtatcgggggcccctgtaggaaggtagggaggatgtgggggtgttgggggcccctgtgggaaggtggggagatgtgggggtgttgggggcccctgtgggaaggtggggagatgtgggggtgttgggggcccctgtgggaaggtggggaggatgtgggggcgttgggggcccctgtgggaaggtggggaggatgtgggggcgttgggggcccctgtgggaaggtggggaggatgtgggggcgttgggggcccctgtgggaaggtggggagatgtgggggtgttgggggcccctgtgggaaggtggggagggtgtgggagtgctgggagcccccgtggaaaggtggggaggatgtaggggtatcgggggcccctgtgggaaggtagggaggatgtgggggtgctgttgggagcctggctatttgcctaaccacagaatatctgtgactgtctgatcatctgcacataattggcttttgaaaggggtgtgtgactcttttactctgaagagaggacattcttctgatacccagtctcacaataaaaagttgctacctttactttccccacttggccaatgatatcagtagccacactgcaaactctgaagtctctcagagctctagtctaggactccagagcgtgagtgcgtctgtggtggtgggcttgacctgaggctcatccttgtcacctgctcggtggcagtgcctgcgtgcagacccctcgcagcactcaggtgtggcccgtggacttgtggtttcgctgctggctggggaaccccctccggctcctcacttccccaccaagcgctggtcacagaaacgcccttctctggtcactgctctctggcctggcttggtggtggctttggtggcagccccgtcacccctgggatccgtgtcctcctgtttctttcgtttctcctgaaggttttccaagtgcctgtttgcttctgggaatttcctctctgccttcctccgacttcctcatagccgttcttttattccggcctcccaagattgcgtggagcccggccactgccagggcggccctgtgatgagctacatgggacacaagaggcagccccaggcgcccgcctccacctctaccagcagcgtcttcgctttcacttctgccttctgcggcgtcttcctctgtggagttggcgtcggccactggctgtggggcaacctcagcctctccagcggacgctgcaccatccctatggtggagtctcagctttggggatccagggtgcctgccggatttcagacagcgcattcacagactgtcgccagctgagccgccctggtgtctggagttgttctgtgtatgctgttatccagttactgactcgcagtcctgcagttgtcttcattagatatatattcaatattttggaaatatgcctacaatgcattcgttgtctcggccagtggctcgtgaccctctgcacttggaaggtatataatttccgttgcttaaaaggcgacacgtatactaacatgtttgtttgtgaattgggatatgcttgcttagttttctggctaattcatctttagaaggagggactcagtcgtggggaataaacgcagcgacccctcggtgttcccgctgggctcgtgggtgacgcagtgttttccggtggcttgggaagaatctggaggtcgggtgctgaggcttgagcgtctctcctgtaggttggtttcgcccggtcctcagggcggagttgctgctcattctcatgctgggcctgttttccgattcctggtgctctcttgtcttcacctgcagttcacttgcgggcagtggaggctgcactgtgacgttagtaactgtgaaggtgtgacccatggtggaaagttggttatgtctgtgattgatggggaggtgtttgtggtcgggggtggaactgctatggggggaaggtttgcaagtcgggagacgggagcaatgacagggccccatgggctgccccccggctcctccttccaggctcctacccttccccatgcccggcctcccccacttgcctttctcttcttgagtcagcaccactactcacacccctgagcgtgtgccagggctgagctccaaaccgggcacaggacctcccggccccacggcgtgcctgcagccccgccctcctctctgaggctcagaggcacagcaggtgcagcacagccttggccctgaggctcccagcatggttgtcccggccagtggcttgtgactctctgcccgctgcgtttgggggtgaactgaaggagcccgtgacccgggtccctggcagctgtggcctctttgctgcgcttcctctttggccagagccaaaaccaggttctcttctgcacactggagcagggaccttggcctcaaattctaatgcctgagtttatagttctcccaacttccccagagccggcccatagctcagtcatgtgaacctcgacaccaccctggttttccaggtgagatgagcctcagtgacaggcagaaacacgtggccatgaggaatgcaccagcctgagtctaagggaaagctgccgatttctagcactgatttgcagaggggtgggcgagcctgcccagtgccctgtggtgaagaggagtctctgtcctgagagaggcaccgtgaaggcaccgtgctgaggccagcctcagagccgcggggaagccaggtctgtctgatcgcttcccagcacttcccgtgccatcccacgcggctgtaaatggacacacgttagccacagctgctgcttcacaggcagcctggtcagaaacgtactcctgtcgaaaatggagggtgaatcgcatgaaatcagcgttacgtttgctcctgctgcatttcatgagtccagcggagtctgttccaactgcaccccccaatcctggacgtgctgtgggctccaagcgatgctttggtcaccggctcttttcctctgtgtctcgactcttaggaagctctgtgtttcttcccactgttgtgaactatcagaattaggcattccagagtaggccaagaatgatttggggtgagaatttatatttttatttcagttctggacccagtaaactatggtctaggtccgctggcaccccacatttcccaggtcgactgtgtttccagatcaaagggatgtccctgtgcttttgtggatcattgtgacccaagtgattttgtgcaaaaaatatcttcatggcaggagaatgccactgagagccttgaaaatacctgagatttgtttgaggaagaaaagaaaaaaggaaggagagaaatccagtcgttaccatgagtgtgacgagagtggggagaaccagtggagcttctgatcctgtcccagcagatgccagtggctcggaccaaggaggacagagggatgggcgtgcccacgtgaagcctcaccccagaccccagaccctgcttacatgccgggacgaaggtgggagagaaccgtgcatctcagcacggcggtggaaacgtggtccacctgcggagggcctgtttgcgtttattacacccgagcaaggcccgcacgcccaccagaggggccagggtgcccctgggagccactgagagacgggggaggcacaggctccacgcgccgcttccctggactgctaggaggcggcgatggcgagtcaggaggaagcctatttttagaaacgcttaagtgcccacgatcttctgaccatcaaacaagaaacgttgctgtttgaagctatacacggacggcagaacaagaagtggctgtgtcactggatacctgtacatttgaataccggccattagggagaatcgccctgtaaacattgatccagtgattgaggccggtcggcttgcttctgttctgccccgcggtgtaattcagctaataggttttgtttgtctcagctgaaatgtgaaacttccattaggtgtctaaccctggctaaaagtggttttcagcctatttttaaaaaatctcctttgtccctgcatgcattctaaccccattctaacctgatgcgggcagccacaacccaggccctaacagagttcatggtaaggatggtgaaggcgtgacccacggtggaaagttggttattttgggtaatccagcgattttctgattgaacttcgaatgcggaaacatcttgcccttactggggcaacgaggggaggcaaggcgtgcgccaggcagagacaccttggaatcccacccagcccagatgtgtctcctgggttctgggacgggcgcaggtgactgtatttgcgctggtgggaggagttgcccccttggttaaatccggaggacacagctgcatggtgcttgccctcagccgtttctctcttcttactttgagaataatctcttttttttctagtttctcttttcttaggcatactcctttggaaacttactgggctcacttttacccactatgagaccctatctgtcatgagtagtgcaaggttagagataaccaggtccacatgcacttgtgtctttctgtagtgtgaggcctttgttgacgttatttcagtcacaaaagccgggaactgctggtgcttcccgtcactcgggtagtcccagccgcgggcacacaggctcaagccactcctcacatcagtcaatgttgtaaaccatagtaatagtatacctaatcaatacataaatgttataaacactccacaacaaacaaagtaacatttaatatcaagagaaaaagggagataggaggaaacgttaatgaaccagtccggtggggagtgaagcagacaccgggagccctgggctgggcggggtggtccgtggtcttacgaggaggactcaggtggcagagcctgcggggcagatgccaagttcttatcacaagtgactgcgaggcggcagcggctgaggcagagtcctcccatgagaactgagtgctttttgtgtccttacctggttggatactgtcctattttttttaatttgtttattaagcaaatcaccttatctttgttggcaaagtgccctatgaaatgtaaaacaaagtctttttctaagacggagtttattatgtcaacagtgctctatatactatatataaaaactaaactttaaaaatgttgctgacacgaaaattgagagaagcctacgtttgtgcagaagatgggcaggtagaaggttccagcggtgaggggtgctgacctggagcggctgcggtggggccatgtggctggaagcagggcagtgagcagtgctcagcctgtcgcgagtgtgtaggaagagagctttgttgaaatataacttacatatcataaaatcacccacttaaacaatttgatgagttttattatatttaccaagctacacaacatcaccacaatctaattttaaaacattttcatcaccctcaaatgaaaccccatgcccagtaccaggccctcccaagtgcttgtcatcaccctcaaatgaaaccccgtgcccagtaccaggtgctcccaagccctgtccccagctcccctcccgtcatgccccagcccagccctgggcagctgctaatgcaccttctgttgcccgcagatttgcccgtgtggacgcttctcgtggatggagtcaagcagcctggggctttgtgactggctctgccacttggcggggtcaccccgcatttccctggtgactaagggtgctctgcgtcctctcctgggcttgttggccatttgcaggtctctagagaaattccgccttgtcttttctatttttgagtttgaatcattctgtatatattccaggtacaatctctaattgtttatgattggcatctgatcacggatgctccatgtagggaatggctctgccatgaaagcccaagaaccctgagtgtgtccacgtgggccatacagggaaggcctggtccatggtgatctctgtctgggagggactcaggagcctcccagagccccgagggctgtggcctgtgaggtgctcccttgtgccatggcccatccatctctctccccagagggtgccatgaggctgtttctcatcgcctctgggttctgatgagctgtggcgcctcctgccctgccctgccctgccctgccccaccatcgccaccctcagaacagaatgcaggctgtaaaccgcttagtggtggcctggattggcctgcagcagtttgcgtggtgtcaccctgcccttctgttttcatgtattttaatttatttgctgcttaatctgagcaaaggaaatgccgcctctctctgtatcgaccaaacccaccatggctttctcttcccacgggtgagtcttgctttcccgagctgtacgggtcccaagccgatgccaggcattcagccagtggccaggagtccttccccactctccctgccctctgaaagagcaaatgaagggaatccttgaacctctgggaagctgtagcccttttgtaaatgtgcagccctgtggcggatgggggtcccaggaaaggcccagggctttgtctgcagaaacagctttttcctgtgctcttttgggtaactggtccttcctcaacactgttgatagcagctgtggcgctgggctccatgcagcctgcagcagaacagggtgtttttagtcgtggtgccctctgtgtggcacctgccaacgccccgcgtgtgtgagtggcgatctgcgtctgtgggtgacgcgcatcacggggtgtggagaggtgcacctgtgcgggatttccacgccacctccaccctccaccctccaccctccaccccacctcgtgccttcccagggaagtcctgcctgtgcctctgctgccttgggaagagaaggggtcccggaggaactcacagagcggtggaaggcatcaaagaacctcagctcctcaaacacagtgcccgctgcctccctgcttcccgtccacctcacggggaactaggaattccctcctgtgtctggcggagagagaacctggctaagcattgcggccgaaggttgcagcctcctaggaaatgtccaatacaaaggatagactgcaggctattttgattttactcattttttaacagaacttttatgaaagcagattttacttgggtctggtgccaggatttgtctttacttgtcacatcagctgatgcctcccaggtttcgtaagtcatctgttctaaactggaagccaggtgtcttacatcaaagcttccggtatctccagttgcagaaattagaagagggtggttgaggaccatgtcttcctgggtgacgcccttgagaagatgtcacacctgggccctgtttattatatttggagaaatgggagacgatgatactttagaggaacacagatcccattccagcaactattttaatcagggactctcaggggagggtgagattccaacttacaaattgcaaatgtgcgatgtgctgcacccactcacaaaagacgtgtaccagatcacagttgcggctcatttcaaggtaaagcagccctgaaagacatgcagaaccagagcggttgcaagacccagactgagcagacaggggaggcttcgccttcctgtgtttgcatgcacagcccggactgcatggtgacttacagtgtatttctcatcccaggtcacagtctcagagtgtgagagccctgggtctctgggtcaggtctgaatgaacgctctttcctatgggccttttcctgtcactgccctgtgtatgtcagactggctaagcaacacacatgtctaccggcatcggtgaagagcgtcgttggcgtgcgaggctgtgtgtctgagcagctcctcccaccttcccccgtcacgggagccgcagagttgcaagaccctggggaatggaggctttgttgttcggtgggtcccacttcatcggggtaggcggcaaggccagcgggctgcagcgtgtgcctcggatgtggcgtctgagggacagcgagtgggttgcccgcaggggccttgcttgcactggcttagagagctaacagcgtttggtgggactcagtttatcgttctttccctgctttgaggcaggcccttgatgtgcaggtgaagtgcccgtgggctggccgcgtagcttccaggtgtttcttcttccagtggggttggcagaacacggcgtgaagctctgctgtgaagatgccgaaaacagcgcccctctctgctgaagggctcgttatccgactctgccttagccccgtcctcttccttcctaccacacagcgggaggcatgggatgcacacaggcgggcttccacagtcggggggccgctgacaggaggaacccctcccagcagcttcagggtgcttttggcccagcagcctggggcctccaggacatgcctcctctaaaggggtgttaggtaactgcagttttctcctctcctacttaccgttgccagagtttttaaaaagaaggaggcgaatactttcaaatgacttatataaaaatctatattttaaatttatttctgtaagaaaaaaattggttggtacaaatatagcaaaaatgttaacatttgtgagatctgggtgatttatttccttactccagttttctgcacgtttgaattatttcataatgccccccccgcctgtaagtgggtgtatctggagaggtgtcatccttcctgaagagggacagtggctgagccacttgtgaccagggaagcccagcccacacctccacggccctggcgcagggcgggcgcgacttagttcacgacaacctagtttctgcccccagttccaacttggggtcagccagagaacagcaagtacgcccccgtccccttctccccttgccagccccacaggctgctgcgcctcccgggcgtgagcccacgccgtcaggcccacagctgccctcccagccctcttccccggaccccttcccgcctccctggcccggctggagtccctgggagcccgtggaggcggctgacctgcaggctcggagtccgtggctgctgctgcttgttccagtggctgtcgtttgtttccacggggattcatgttgacatctgttactcgtcctcaagtgagcccgtctgcatgaaggcacaccttggggctgctgagtcagccacatccttgacagttccccacagcccctgtagtgtgtcctgtgtgtgagcaaaagcgcaggccagatcccagaccctccttccatccccggactgggcgcattggagcaaattcctccatgctgcctgctccgtcctctcccttgccctgttcctttccatgctttattaacggggaaatgtggggagggtcagagggccagtgaggccagtgctgcccctcaaaaggcaggtgtctatgctgcgtgacactgaacgctgcctaaaccatctggataattgatcgggtgtgagtttgcacgctgtgctccggcctgcctggcgatggttctgggtttggtgttgcgctctgtcaagtaggaagtgatagtaaattctattttatttatttatttttttgagacagagtctcaatctgtcgtccaggctgaaatgcagtggcactgtcctggctcactgcaacctccacctcccaggttcaagccatcctccttgcctcagccccccaagtagctgggactacaggcatgtgccaccactcctgcctaatttttgtatttttagtagagacgaggtttcgccatattggccaggctggtttcaaactcctgacctcaggtgatccacccaccttggcctcccagagtgctgggattacaggcttgagcccccgcgaccagccgagatgacctgtcgggtgagaggcttcagctcctggcctgagattaatatctgaccaaatgctgtggtgcacactgagagtgtcgcatcgtagatcttctgaaacgcagcgtcttgccccttgagcctctctgcaccgcgggtttggagttcatgctcctgtggcagtggcctcaggggtgtttgctccttagggaaattttcctcgaccactgaacacaggtcctgggcacctgtcagaaagccacactgccaggcaccaccaagctcaggcgctggcacctgtcagaaagccacactgccaggcatgtgcacaaagactgtgtgttttcaggcagcagtggatcaatcccaaatgtcaaaactatctttaaaaaaataactaaggctgggcatggtggctcacgcccgtaatcccagcactttggaatgctgaggcgggcaaatcacctgaggtcaggagtttgagaccagcctggccaacacggtgaaacccagtctctactaaaaatacaaaaattagccaagtgtggtggcatacacctgtaatcccagctacttgggaggctgaggcaggagaatggcttgaacccgggaggcgaaggttgcagtgtgccgagatcacgccattgcactccagcctgggggacaagagcaagacttcgtctcaaaaaatatatataataacataataattaagggaaggagccacagaggctgcccaggtagctgcattgatgcaatttgtggtgacattttctctgaggctgctgtgctgtgcggttacagctgcccctctgcgaagccccctcccgctggaaggtgggtgggaaggctgccggaaggctgccaggatgctgtgcggtgccaggtcctgagcacacatatcaggagaagggatgtgagacttcctcccccgtgggctccatgcagccaggaagccctgccgctccctccccatgcgctccccacacgccgctcaccgtgcctttctcccccaacgccagatgtggaattcctctcggaggtgctcttatggcaccctgcacggagaggcctgggcctggccccgaagaaggcacagcccatgtgcaggcgcctctgtctggaaggcatgctgcgtccattttactgtttccccaaccctgtggcactccttcctgttccttcttctacagtcttccgtgtgaatcgtggaaatgagtcagatgggcatgtttaacatcataccacacataccttttgcaaaaatgtattttttagcggccaggtgagcagctgatgtggtggacagaaagctcaccggaggccccaaggccttgcagcctccacgtgcctctcatcagtgtgtgaggtgcagtaggcggaggtttgctgagcttagcggctctgtgagaggaggtcgtccaggtcagcggctttgaaagccccggcacactccagctcccatgcagttatgctgtgtaagaaatggcaacagggccaaaaccttgtaactctcttcagagttggacgtaaaacactgaggtagctagaaatacattctaagttgaggtaatttggggcatggtggcatgcctgcaatctcagtgctttgggaggctgcacagggagcattgcttgagcccaggagttcaaggctacggtgcactgtaactgtccctgtgaacagccgctggagtgagtagccactggaatgagtagccgctggtttgaggagtagccactggagtgagtagccgctggagtgaggagtagccgctggagtgaggagtagccactggagtgagtagccgctggagtgaggagtagccgctggagtgagtagccgctggagtgaggagtagccactggagtgaggagtagccgctggagtgagtagccgctggagtgaggagtagccgctggagtgagtagccgctggagtgaggagtagccgctggagtgagtagccgctggagtgaggagtagccactggagtgagtagccgctggagtgaggagtagccactggagtgagtagccgctggagtgagtagccgctggagtgaggagtagccgctggagtgagtagccgctggagtgaggagtagccgctggagtgaagagtagccactggagtgagtagccgctggagtgaggagtagccgctggagtgagtagccgctggagtgaggagtagcccctggagtgaggagtagccactggagtgagtagccactggagtgagtagccgctggagtgagtagccgctggagtgaggagtagccactggagtacgagtagccgctggagtgaggagtagccactggagtgagtagccgctggagtgaggagtagccactggagtagccgctggagtgaggagtagccgctggagtgaggagtagccactggggtgagtagccgctggagtgaggagtagccgctggagtgaggagtagccgctggagtgagtagccgctggagtgaggagtagccgctggagtgagtagccgctggagtgaggagtagccactggagtgtgtagccgctggagtgaggagtagccgctgtgcttcagctgggacagggcagcaataccccatctttaaaaaaagtaattaattattgtttaaaagtaaatagttttcacttcctcggagattttcaggaagagctttatatctaagtttctagaatttacacagaagactgaaacagagaagcacttctgacatctaggaatgacttttcctgccaggcgcagtggctcacgcctgtcatcccagcactttgggaggctgaggcgggcggatcacctgaggtcaggagttcgaggctagcctggccaacacaccatttctactaaaaatacaaaattagctggacgtggtggcgcttgcctgtaatcccacctactagggaggctgaggcgggagaattgcttaaacctggaagcggtggttgcagtgagccgagattttgccattgcactccagcctgggtgatgagagcaaaactctgtctcattaaaaagaaaaaaaaaaaagaatgacattttcctctaaggtagtaaagaaaatcacttgagtcattaaagcattaaaccaaaggcaagctgaaaatcagagcaagtttgatggtggtagttgtacagatgagtgatatctcttgatgccaaggtgactgttaggtttctagaatgagaaagtgtggaaataatgatctcgtgtgcaaaccatgcatgcctttcatttggcaaaaatacttacaacatttttactgaggtataattcacatactgtaaaatcctcccttttaaagcatgcaatccgttggttccaactggaaaatattcaaagtcgtgcacccaccaccaccctccaacccagaaggttttcatcccccagtcagaggcggtcggcagccaccaccgccctccaacccagaaggttttcacccccgggcaggggccatcagcagccatttgcccagcccccggcagcccccgtctctgcgttcgccttttctgggcatttcctcagaatggactcacaacatggtgttgcttcacacatgggatgctttctgtccccacgcgtgttgctgtgggtgtcggcgcttccttcctttccgtgtatcccttcatcagtggacgcgcgtttggaggctgccacctttgtcttccatgaacagcgcagccgtgaaccttctcgccgaattttttgtgcccctccaggagtcgctcgagatgtttcctttggtcggtttgtgtcctatggtcagtcacatcagcacagggtagatttttacttcagctggaacttgatgccagccctccaggggacttgccacgtggctttctcgatgcagtttggacaatgggttgttaatgagtcattaggaaacctgttacttgacatagacagtttggtgcctggtttcagctttgctttgctgatggaagcctctggccgtgggtgggttctgctgcgaggagttgcacagggctggctgagctgtgtggctgatcctgtctgggaacgcggagagagagaggctggggtctccatcctcctgccctggagagcttcccgactacccgtgtctttgctctgaatcctgaaaacagccccgtgtgatgtgaccccgtcttttgtttgtttgtttgttcgtttgtttgagacggagcctcggtctgtcatccaggctggagagcagaggcgccatcttgtcactgcaacctccacctccgggttcaagcgattctcctgcctcagcctcccaagtaggtaggactacaggcgcccacatgcccggctaatttttgtattttttttttcagtagagatggagtttcaccttgttagccaggctggtcttgaactcctggcctcaagcgctccgcctgccttcgcctcccaaagtgctgggattacagacatgagccaccatgcccggcagggaccccgttttgtctatgtccccgtttatgcacagtatgtctggccctggattcaagaccggtgaggttcagaagttacacgattgaggctcctgagtttgttttcgttgctaactgtacagagaaccagaatcctagggctgggaggaccacgaaggttgggcctcctaatcccttcatgtcgctgctgacaacatttgacggacgcgtggtgtgaggcagccgcagccacagagccagtgagcagcagggaccgggcgccctgtccccaggctgctgttagtgacggtgtctgcatcctctgggggtccagcgtgttttcggctctgttccttttgggcagtttagtcttcctagaatttgaccatgtgtgggctgctctgtctatggagtagctgttcttttattcatttgctttcttaataaacttgctttcactttgcaaaaaaaaaaaaaaaaaaagaatttgaacatttgtggagaatacaacacaaagagctccctttggtttgaagtgtgaacctgaagagacatgtatgtttccgaccttcctgatgccctgggtgaggccgtctaagtgacctcatggcttcaggtcctttcctgttccaatctggtgtctgttatgctgacgaggccatcaggcaaggccgcgcacttgccaggcaaggcccactgcatgttggcaggcagcctgttttctgaagccatggcacagacaagaatactcattcctacttgtgtcgggttaaacgccgctacactgttgggctgtatctgagttgtttttgatgtaattatttaatgataaacgtctgctcgccggtgttgagactttggagtgggcttcatccattcatcctgatcgttcctccatgagacagggtccctttgttgctggctggaagcggccgggaagcgtgggctcgctgtggcatgggcaatgccacacggctccagggaagcgttcagctttccaaaccagtgtctgggctcgtggccactcctgaaattcagttgccgtctttgaagcttcgaagaaagtttctaggattttcacttttgtattaaaagatatctgtatgcttttctctctttttctggttcacttatattcttattcagtgcaatttcctgatttcacgagaatgagaagcatctatttggctatgttctgtgaaaacaaaggagccagggactttgcttagcctttataggcagcagtttatttatgaagctcttaggatgcttttaaagtccacatccctgtggtttgttggcttcaccacaaaatagagacagcagggaaggcccccgtcaggcagggagacccagtcccggaggaggagggcccgtcctcgtggggaggggcagccaggctgtggcatggtcagggcagtggggctgtgctgcccacctggctttgagtccaggatgacggttactgcatggccagcaggctcgcggggaggccacgacccaaggtcgcgctgaggaaaactgcgtctggctcatttgagggtggagtgttcctccctggcctggtggctgccttgtacgtctgtccccaggagcatggaagcctcggctccccgtggaaacactggttgatagtctcagccaaacatctctgaaaacacagttggggcacatggagactgctgtggtctctttccgttattttacttagacttttctgcaaagctgagtcctaataaaagaaattgcaggtgaattaccgatggaatttattaaagcaaatgtgcagacattcacacagctcctgtccgggacgttctgggtgggacagtgtggaaagacttcctctgagaggttggtaggggagcagaggagctgatgacatcaagtccaaaaacagccccatgaggtttataaacaagagcaccacgcagacagggactccagactgttcagaccctgcctgccttttttggctttaaaaaacgagagttccctgaagcaccgaggggcagcccacacagagaggacttggccctgagcatttacaagtgtctgtgctgggccgggcccctggccttgttctgttcccgttgcctcatttcatgctccaggaccctgagaaagtgctggtgtccccctcatgggtgagaagctcagcgggaaactgtccccgtgcctgcggcgaggagtggcccagcagccaagggtcagcccttcgacggcagtgcccgctcgtccttcccgtcccactgcaccagcattcccctcatggaggaggcttccgtctcctcttcagctgtgtttctcatgccccagaaaggctgatgtcttgcagttcctacagagaactggggcgtgggacgagagccacacgctaaggccccgtattccgaggtgggctcagggccatggccagggctgcgtattcagatgtggcgtttggatttcccgttacgagctaaagtatttttgtggttttagtgctgacatcaaatggcccgcctgagtgttgttgaaatatttcttgtcagagctgtttccttaactcctccaaatacagtgttccgagtaatacagagatggtcaggcccaagtcagctttgcaggagagccttcctgttcctgagcagacacctagcagggttgagcgactcttacccatctgcagatgcagggccggtgaccccacagtggggcaagagcctggagagctcttggctttgcccaggaaggaattcaagggcaagcaggaggcggaagaaacagcttcattgaagaggctacagctccctgactgcccctgcagagcggggctgccctgttaggcggagaggagtagctcagggcagatttaattgcatgcagattaaggggtggtttatgcagaaatttctaggagaaggatgtaacttgtaggcgatcgggtcattgccatggaaaggggccgcagctcctggctgttgccatggcaatggtaaactgatattcacaccgcgggcatgtcttatggaaagctgcctctgccccagccctgttttcaccagtcctcaatctggtccggtgtccaagccccacctctggagtcaagtcccgccttctaccccagtatcatagtttttctttcctcttccattaaagacctttcccaacatcactgtctcttctgttttggaagccttacgatttggccacacgttctgttctttttttttttttttgagacagagtctcgctctgtcccccaggctggagtgcagtggtgctatctcggtcactgcaagctccacctcccgggttcacgccattctcctgcctcagcctcctgagtagctgggactacaggcgcccaccaccacacccggctaattttttgtattttttagtagagacggggtttcaccgtgttagccaggatggtctccatctcctgacctcgtgatccgcccatctcggcctcccaaagtgctgggattacaggcgtgagccgccgcgcccggccgcgttctgttcttatgtacacgccctgagctgtttccactggcagtcagctttgaagttcactgtgtggctctcacaggagcgcagaccctcctggtgctcaccagaagaccttggcccatgagggctgcgtaagacagggtggctcgggcctggggtgctgggccccaggtctccctgcagccctgaacgatgctctcagcagcaggtacaggtctccgttccgacgaacgtgcctcaaggcaacactctgggcaagagcttttgatgcaggttctgaggcagctgcctaacaccgctctcctttccgcagtgtgcaggagaagagaattgggtggacagcaggaccatctacgtgggacacagggagccacctccgggcgcagaggcctacatcccacagagatacccagacaacaggatcgtctcgtccaaggtaacttggcttgggtctgagtgtccataatgtgtctaaaaagcagctgccggggggtgttagtgcttctcggtttcaaagagcggctctgctcctggccctgctgtcacagccaccagccacccccagcaagggcttcggatcaggacctcaccgagggcgctactctctccctctcggtgactgcccacaggaggctttccacctgcccagggctcacagcgcagtgtctccattctcgggtgaccgtgccacagaggcagtgcaggtctgaagtccaggatccaaaccctacccaggtcccacttctgaggcgcctggccacgtgcttgtcgtgggccaccctggccagagtctcagtgccagtaaggtagaaacgataccagccaccccggagaaagagccaacaaacgcaggctggacagcaaaacctggggggaaatctttgagcttgttcacgaggtgcagcccaggtaaagcgtaggaagcacaagcagagtgccgcggtctaaacgaagcgtgtttctctccatggactagagcgtggaagtgcacacacatttcccacgttcagagagtgacctggaaacaggtcttaagaacaaggtggaaatttagctgctgccattaaacatggggtaaactgtgctttccaggtaatgcggaacgcacgtgcctgcgttcagactccatttatcttcaccgtccttcaaaatggatgagctaaacccacgcacacgcgtggacgggctgcacatggggtaaactgtgctttccaggtaatgcggaacgcacgtgcctgcgttcagactccatttatcctcaccgtccttcaaaatggatgagctaaacccacgcacacgcgtggacgggctgcacatggggtaaactgtgctttccaggtaatgcggaacacacgtgcctgcattcatactccatttatcttcaccgtccttcaaaatggatgagctaaacccacgcacacgcgtggacgggctgcacatggggtaaactgtgctttccaggtaatgcggaacgcacgtgcctgcgttcagactccgtttatcttcaccgtccttcaaaatggatgagctaaacccacgcacacgcgtggacgggctgcacatggggtaaactgtgctttccaggtaatgcggaacgcacgtgcctgcgttcagactccgtttatcttcaccgtccttcaaaatggatgagctaaacccaggcacacgcgtggacgggctgcacatggggtaaactgtgctttccaggtaatgcggaacgcacgtgcctgcattcagactccgtttatcttcaccgtccttcaaaatggatgagctaaacccaggcacacgcgtggacgggctgcacatggggtaaactgtgctttccaggtaatgcggaacgcacgtgcctgcattcagactccatttatcttcaccgtccttcaaaatggatgagctaaacccacgcacacgcgtggacgggctgcacatggggatgcctgtggcggcccaccattcacacgtgtgccctcacctgtagacgcatttaatttacattgggtgtcctgccgtgtaaacttctgtggagacctacttaattcacaccaagtgtcctgatgtgtagacccctgcgatagacctacttaattcacaccggtgtcctgacgtgtagacccctgtggagacctacttaattcacaccgggtgtcctgatgcgtagacccctgtggagacctacttaatccacaccgggtgtcctgatgcgtagacccctgtggatacctacttaattcacaccgggtgtcctgatgcgtagacccctgtggagacctacttaattcacaccggtgtcctgacgtgtagacccctgtggagacctacttaattcacaccgggtgtcctgatgcgtagacccctgtggagacctacttaattcacaccaagtgtcctgatgtgtagacccctgtggatacctacttaattcacaccgggtgtcctgatgcgtagactcctgtggatacctacttaattcacaccgggtgtcctgatgtgtagacccctgtggagacctacttaattgacaccgggtgtcctgatgcgtagactcctgtggagacctacttaatccacaccagtgtcctaatgtgtagacccctgtggagacctacttaattcacaccgggtgtcctgatgtgtagacccctgtggatacctacttaattcacaccgggtgtcctgatgcgtagactcctgtggatacctacttaattcacaccgggtgtcctgatgtgtagacccctgtggagacctacttaattgacaccgggtgtcctgatgcgtagacccctgtggagacctacttaattcacaccaagtgtcctgatgtgtagacccctgtggatacctacttaattcacaccgggtgtcctgatgcgtagactcctgtggagacctacttaatccacaccgggtgtcctgatgtgtagacccctgtggagacctacttaattcacaccggtgtcctgacgtgtaaacccctgtggagacctacttaattcacaccggtgtcctaattcacaccggtgtcctgatgtatagacccttgtggagacctacttaattcacaccagtgtcctcatgtgtagacccttgcggagacctacttaattcacactgggtgtcctgatgcgtagactcctgtggagacctacttaattcacaccggatgtcctgatgtgtagacccctgtggagacctacttaattcacaccaagtgtcctgatgtgtagacccctgtggatacctacttaattcacaccgggtgtcctgatgtgtagacccctgtgtagacctacttaatccacaccgggtgtcctgatgtgtagacccctgtggagacctacttaattcacaccaagtgtcctgatgtgtagactcctgtggagacctacttaattcacactgggtgtcctgacgtgtagactcctgtggagacctacttaattcacaccgggtattctgacatgtagacccctgtggagacctacttaattcacactggtgtcctgacgtgtagacccctgtggagacctacttaattcacaccggtgtcctaattcacaccggtgtcctgatgtatagacccttgcggagacctacttaattcacaccggtgtcctcatgtgtagacccttgcggagacctacttaattcacaccgggtgtcctgatgcgtagactcctgtggatacctacttaattcacaccggtgtcctgatgcgtagactcctgtggagacctacttaattcacacctgtgtcctgatgtgtagacccctgcggagacctacttaattcacaccgggtattctgacatgtagactcctgtggagacctatttaattcacaccgggtgtcctgatgtgtagacccctgtggagacctacttaattcgcacctggcatcctgacgtgtagactcctatgtagacctatttaattcacaccgggtgtcctggcgtgtaaacccctgtgtagatctacttaattcacacccagcatcctgacctgtagacccctgtggcgacctacttaattcacacccggcatcctgacgtgtagactcctatgtagacctatttaattcacaccaggagtcctgatatgtagatccctgtggagacctacttaattcacacctggcatcttgacgtgtagactcctatgtagacatacttaattcacattgagcatcctgacatgtagacccctgtgtagacctacttcatttacaccaggtgtcctgatgtgtagacccctgtgtagacctacttaattcacaccgggtgtcctgatgtatagacccttgtggtagacctacttaattcacaccgagtgtcctgatgtgtagactcctgtggagacctacttaattcacaccaggtgtcctgatgtgtagacccctgtggatacctacttaatccacaccgggtgtcctgatgcgtagactcctgtggagacctccttaatccacaccaggtgtcctgatgtgtagacctctgtggagacctacttaattcacaccgagtgtcctgacgtgtagacccctgtggagacctacttaattcacaccggtgttctgacatgtagacccctgtggagacctacttaattcacaccggtatcctgacatatagacccttgcggagacctacttaattcacaccagtgtcctgatgtgtagacccttgcggagacctacttaattcacaccgggtgtcctgatgcgtagactcctgtggatacctacttaattcacaccggtgtcctgacgcgtagacccctgtggagacctacttaattcacaccgggtattctgacatgtagacccctgtggagacctacttaattcacaccgggtattctgacgtgtagacccctgtggagacctacttaattcacaccgggtgtcctgatgtgtagacccctgtggagacctacttaattcacaccgggtgtcctgatgtgtagactcctgtggagacctacttaattcacaccgagtgtcctgacgtgtagtagacccctgtggagacctacttaattcacaccggtgtcctgatgtgtagacccctgtggagacctacttaattcacacctggcatcctgacgtgtggactcctatgtatacctatttaattcacaccgggtgtcctggcgtgtaaacccctgtgtagatctacttaattcacacccagcatcctgacctgtagacccctgtggcgacctacttaattcacacccggcatcctgacgtgtagactcctatgtagacctatttaattcacaccaggagtcctgatatgtagatccctgtggagacctacttaattcacacccggcatcctgatgtgtagactcctatgtagacctatttaattcacaccaggagtcctgatatgtagatccctgtggagacctacttaattcacacccggcatcttgacatgtagactcctatgtagacatacttaattcacattgagcatcctgacgtgtagacccctgtgtagacctacttaattcacaccgggtgtcctgccatgtagacttctgtgtagacctacttaattcacaccgggtgtcctgatgtgtagacccctgtggagacctgcttaattcacaccgggtattctgacatgtagactcctgtggagacctacttaattcacaccgggtgtcctgatgtgtagacccctgtggagacctgcttaattcacaccgggtattctgacatgtagactcctgtggagacctacttaattcacaccgggtgtcctgatgtgtagacccctgcgatagacctccttaatccacaccgggtgtcctgatgtgtagacccctgcgatagacctccttaatccacaccgggtgtcctgatgtgtagactcctgtggagacttacttaattcacactcaagcatcctggcatgtagacccctgtggttcttaattatttatgtgctcttgaagagttgcacatttttaaagaatattttacaacagaaaaggtcaccttttcaaagccttttttatgggattaatttgtaactacaggattgcaaaaaattttaatagctttaacctctagaaacaggatatgtaaatgctgaaaaacaaagtcccaaccagataagtcctgtgggtggtttcccagtcatgattcatggaaggagaaatgtactgatgagaaatcacatccaaaatattgtctctgcagtggtaatacttacaaagtcgacgcagtctcaggcggagctcactgaagatggtttccaagcttatatgtacttcacccatcccccaccctccagcccaaaacaaatcccaaacatactgcttagaactcagcctgcgcagcccagaggtacagagaggcaggaagcacccaggtgtccacatacggtgccattgtggacttgtagggcaggattccaggatatgggtgatgggcgtgtggaaccgcggcgccccctgcacagtgtggctcatttgagccggatgggggccgtgaaggcatcacccagcctgccccctgggagctggcttctcccttcctggggcggagctcgcccgacagccccacatgcctggttctccctgcagatgagggtgctgtgtggggtcacagggaagaaaccagcagcagcggcagagcttgatccaggcattggaggagggtcctggtacccctggcaggggctggcgggaagctgcacttctgtcattgcccatggcggctttggaggagatgacagagcatggcgaattctgcctcccactcctgacccctctgctgtgtcattcaagttttgtccttttcctactgtccgtttcgaacgtcactgcaggcagtggcctcggtggcttcgctccgcctggccctgctccctggctctgtgctaccctctctccccctcggctgggcccttcctctccgctgctccctgtggaactggagcccctcaaggtctcttcagtttctgatccggggagccctgcaggttgtcaggatgggttttgtgggcttattgctgctttccaggacctttgagaagccgtaagtctccttcctaccaggaagccctcactcaggaacgcacagaccggggtcaacaggctctcaggagcgccgtctgcgtgcaggtggagggtgtggcggggccaggagagcacttggccgcctttcatctcaacctctgaggacagaagggggctctcaaatccgcccatgcattgagatcttcgctcttcacagaggtgggattagtagcttagtctcagtttcaagtggatgaggttgtgtaatttcaagggaaaattacatccggcaatacctcttttgctaatggaactcaggaaggaaaggccctcagaaaggctggagtctggaatctaggcaggtagctggcctgacagtaaccttgatccaggtaaaccaaagtggaattctcgagcctggaattgatgactcataattgttttcatttaacagctcaggatgtgtgaaaaaaaaatgctgtttaatttgtaagacctaagtttacgactgattttggagaatacatttgtgataatgtatctatgttttcctggggtggcggaggaaatgatttctacctaaaaaaaagaaatgctagtagttaagactttttaagtgccacagaagcttgttctcagcaagtttgcttttatgaaatcaaaggatgaaagcctttgtcatggaagaagtcgtaatagaggatgaaaatgctgtcgggttatttttaacttctcatctgtttgacggaagtgcagttactggtgataggtgatgatagagtttgtttccttcttgggggagagactttgggcagtgtcaaaacctgaaatgacagcccagcacgccccgttccctgcttcctgtgctgtgcagagctcccccaggcctgcttgcaccccccacgtggggaatcctgaactccacaaagggatggatcactgcatgcctccttttccagatttgtactttggggcacagaattcacatggttcccagctttgcccacaggaggctacagaattaaatgttggcttagactatactgtccctccatgccttcaagaaagttgaatccttctggtaattggggagaaaaaattccctctgcaattcgtaggtatagccagtgttttcatgacttctatttgtataaatgatttccatgtttattatatcatgtaatctctaaaacaaccctgtgagcccaccaatactgattattaccaatgtatccatgaggaagctgaggcttagagctcagtcatgtgcctgaggccacagaagaggatagagcccctgtagtctggcactgggcttggacttccttccgcagagccaggggccctttcttttcatttttgagacagagtctctctctgtgcccaggctggagtgcaatggtgcgatcctggctcactgcaacctccaccgcccgggtttaagtgattctcctgcctcagcctcccaagtagctggaactacaggtgcccaccaccacacctagttaatttttatgtttttagcaaagatggggttttgccattgttggccaggctggtcttgtactcctgacctcaggtgattcacccgcctcggcctcccaaagtgctgggtttacagacgtgagtcgccgcgcccatccaggggcacgtttcttaacagcccctctgggtgctcacgaatttccggcatcagcaatccaccatcctggcataattttctgtgttttgcatccctgcctcccggtcataaacaaaagagtgacctcagttccatgcgagtggctgcttgtcccaagcagatgggtgtccggcgtccccgcctttttcaggactgtcaggtgggccctgtggtgctggagctgtgttcaggtgaacactagttgaggcttcagacagcttgtaggtgctcctgcgggcgcctgggctgctggcaggggacagtgcccgggttcgtctcgcagccagaggccagaggcaggccaggtgaggccatgctcttccctgtctgcacaccacactgctggcaagtaacacaaaacagagactggctaccccaaggggcaggaggcagcggaaacctgaggctcagacactagtgaggcgttccagctcagggccaaaatcagagccagggcagctgtggactctggctatggcgtctgtcgtacaagtgagaaacgaaaagaatgactgtcccgtgtcattcagcaaaacacatggtgtctttggaggtgaagagaggtgccaagcaccactcggttttcccagatttcctgtaggaggaaaaccacttggttctatgctgtggctttcacgccaggagctcctaggattgaggacgtctactgattgtatcacagtcgaagggcccagtgttacattacattgtgtccccaggcaaatacttacatttttacaattcaacaacgatgagcgaaggataactgtccaccattgtcagccttcccactctaacgtgtggaataaaatgctcatttcagttgattgtatcccgatggtactgctgtgtcagtgcagtcacgaccctttaaatgagttccctgggatttcacttttcttgttagacatcaccaggaattaataaccctccttttgacaatagtagtggtcagcagtaataacttactctgtgaaacatagagattacacagcatcatggggcttggctgcagccctcagtgcctgattagaataaagcaattgaggccaggcgcagtggctcacacctgtaatcccagaactttgggaggccgaagcgggcggatcacgaggtcaggagttctagacaagcctggccaacatggtgaaatcctgtctctaccaaaaaataaaaaattaactgcgtgtggtggcgggcgcctgtatttctagctactcgggaggttgaggcaggaaaatcgcttgaacccgggaggcagaggttgcagtgagccgagattgtgccaacgcactccagcctgggtgacagacagagtaagaccctgtctcaagaaaagaaaagaaaaaaagaataaagcaatcatgcaggtggtttcaaattccaaagctgtacagtaacattcaaatatggcaaggccctgccaggtgcggtggctcacgcctgtaattccagcactttgggaggctgaggcaggtggatcacctgaagtcaggagttcaagatcagcctgggcaacatggtgaaatcccgtctctattaaaaatacaaaaattagccgggcatcttggggggttgcctgtaatcccagctactcgggaggctgaggcacgagaatcgcttgaacctgggaggcagaggttgcagtgagccgagatggcgccactgcactccagcctgggcgacagagtgagacttcatctcaaaataaataaataaataagttatggcaagtccatgagtttgcacagccttccaggcctgatggaagtagatctgcatgtttggaaggattgcagatcatattttatctcataaatattaccagaacttcctcgtgtaacatgggaactttcaaaaccatagagaggagcattgtaaatctctgtggctcgtctccactgtcacagttcccagcttgtggccagcctgttgcatctgcaccttcactgtagttccaagggtcctttggaaggaatcctggacagcgtgtacttttcatctgaaagtacttcagtaaatgaaaggtggaattttaagtagactcttttttcattaatgtgactttgttactgagtgatgtattatagaaatttgtggaaacgtataattgtaataaatttgttggcttggatgctggaaagtaagactggcctcacatgggtgagctaaggtatttctttaatgtatccttttaaaagctaatggagagtaactgactttttcattgtggcccatttgagagaaaatatatctttctcaaatatttaaaaaggtcgatcacatgtgtaatgtttgccaagttgtatacacaagaaaactagaactcagaatcattaaataatttgctgaagtttacatggtttttaaatggcagggtcaggatcgaatatggggactgactctgaagtctatgtgtttcatagtatgctaaagagtaaatatttccagaatttcgatagagtacctaaattatcttgaggtggggttagcaaattgtgaattaagattgtggtttttgtaaaggaagaaagtgcctatacttttattggcaatctggtgtttttgtttgctttttttctgaatgagaaacaaaagaaatgaagagctagccatgtgttctctactctgtctcagtttgtatggctacttttccatccagagctcttgccttttggttctcaatttggttgcattcccatgaagaaaacctagtgtggcaggcagaaggatggcctcccacagatgtccacatcctgatccccagaacctctgactatgacactgtctgtggccagggaatcaagattgccaaacagctgacattaaaatagggaggtgattatagaactattcatgtggccaaaagtaaccacagaggcacttgtaagtggaagagggaggcagaacagactgtccgagctacgactggcttcagaggttgaaggggaccaaaggatgtaggcagcctctgcaggaagcaagaaaaggcaagaaaagtttctccctggagcctccaggaaggaaccagccctgctgatactttaattttaacccagtgaatcccattgcaaacttctgacctccagaacagtaaggtaataaatttgcattgttttaagtcacaaagtggaatttgttatagcagcataagaaactcatacacctgtcctaactactttggggatttataatacagactgtacggagattgacgcggtgtcaaaggacccgtgaccttgagacatgcccatagaatcatacacctgccctagccacatcggggatttgtaatacaggctgctcagagactgacgtggtgtgcaaaggacccgtgaccttgagacatgtccatagaaactttccaaactgaagagcaaagaggaaaaaagagtgaagaaacagaacagaactgtggacaactacaataggtgaagcaggccaggcacggtggtcacgcctgtaatcctggcgctttgggaggctaaggtgggcagatcacctgaggtcaggagtttgagacaagactggccaacatggtgaaaccccgtctgtactgaaaatacaaaaaataaaaattttttttaaaaaaattagccaggtgtggtggcaggtgcctgtaatcccagctacttgggaggctgaggcacaagaatcccttgaagctgggaggcagaggttgcagtgagccaagatagcaccactgcactccaccctgggcagccagagtgaaaactccatctcaaaaaaaaaaaaaaaaaaaaaggtaaaccatatatgcataatgaaaaaaacaaaagaagagagaagaaatatctccagtaaaagtggctatttccaaaattaatggcagatgccaaactaccgatccaggaagctcagagataaatacaaaagcagaataaattttttaaaaagggtacacctagacatatcacatttaaattgcagaaaattagactcagaaaaaatcttgaaagaagccacaggaaaagaacattttacctgctgagaaacaagggtaagaattatatcaaactttcttccagaaaccatctaaggaagaaaagaataatgtaaaatatttaaagtgttgaaagaaaaagccagcaacccagaattctgtatctcataaaattatccttcattcgtgaaggagaaataaagactttttcaggcaaacaaaaattgagcgaattcattgccagtagacctcccttgcaagaaatgttaaaagttcttcagaaagaaggaaaattatataggtcagaaattcaggtctacttaggaaagaagaacacagcactaaagtgtgagtttttgtgctgttacaacagaataccacagactgggtaatttatagagaagagacattgatttccccacagttctagagtctgggaagtccaagatcaagacactggcaggtttggtgtctggtgagggccccatctctgcttccaagatggctccttgagcactgcatcctctggagtgggggaaggctgtgtccttatgtggcagaaggcaaaagggcaaaggggcaaactccctctgccgagcccttttatacaggcacctaatcccattcatgagggaggagcccgcatggcggaatcagaactcttgaaggccccgcctcctgggaccgtgactagttgtcacattggcaacacctgaattttggaggggacacattcaaaccatagcaagaaggaataagtgaaggtagtaaaattaaatattttgcttttttgttgttttttatttcttttagagacgtgatctcaccatgttgcccagacgggtttagaacttctgggctcaagggatccactgcctcagcctcctgaagtgctaggattacagggcacagcacccagcttgcttttcgtgttcttaattggtctaacagagagtactttattcagaatgataatagcatttactcagtggtgattgctcaggggtgaatgaaatgtatgacagcagtgccctggggggcaagaaggaactgggcatgctgttgcgaggaatctgcgccacacacacagtgcgggttatgtgagagtgggcgtatattgtggcctctagtgcaaccactaagtaatttttttaaaaaataagtatagttgatattctaagacaggagagaaaatagtcacatcaaatgcttaattaaaacccaagatggcaggaaaagagtataagtcacaaaagaaacaaagactatgaagaaaggaataaaagtcagttacaaatatggtaaatattaatccagctatattaataatcactttaagtgtgaattgtctaaataaaccaaatacagaaactgtcagaatagaaaaaacaagacctaaccatatgttgtgtgcaggaaaggcactttaaatataaaaacacgggtttaagagatagaggaagatgtaccatgctgctactactcaaagggacacaagattagctatattaatttcagacaaagcagacttcagaacaagagaagttaccagggataaagaggggcattgccaaacaacaaagaggtcagttctccaagacaacataacaattctcaaagtctctgtaacaacagagggtcaaaatatgtgaggcaaaaacggatagaactggaaagagaaagaaaatccactgttatatttggacacttcatgacctctgtccacaggcagaaaatcagtaaggacacggttgaactgaacagcaccatcagtcccttggatctaatggacctttatgtctcacgcgtccatgtgaagagagtccaccaataggctttgtgtgagcaacaaggctgtttattcacttggatgcaagtgggctgagtccgagaaaggagtcagcaaagggagatggaggtggggcagttctataggatttgggtatgtagtggaaaattacagttaaaggtggttatcccttgtgggcaggggcgggggtcacaaggtgcagggtggggaggtcatgagactcattgtccaggggggaatgtcacaaggttgattgattagttggggtgaggcaggaacaaatcacaaaggtggaatgtcatcttttgtggttcttcagttgctccaggccatctgggtgtatatgtgcaggtcacaggcttagcttgggctcagaggcctcacaatttataaaatacttcattcaacaatagcagaccacacattcttctcaagttcacatggaacatttgccatgacagatcacattctgggccataaaatacaccttagcaccttttcaaagaatagaaatcataccaagtactctttcagaccacagtagaattaaactagaaataaataaataacaaagttaactggaaaatcccaaaatatttggagattaaacaaaacactactaaataacacatgaaccaaagaagtctcaagaggcataaaaatattttaagctaaacaaaaaatataacttatcaaatcttgtgggatgcaggaaaagcagtgcttagagggaaatttatagtattgactacatagattagaaaagaagaaagatccaaaatctacaagcttcaacattaggaaacttaacaaaaaattaataatcaacattagaacagaaattaatgaaattgaaaacaggaaatcagagaaaattttaaacatcaaaagctggttctttgaaaaaaaaaaatcaataaaatcaataaaactttagccaggctaaacaagaggaaaagaaaagagacacaaattccaaacatcagaaataaaggaggggcatcactactggtaacatggctaataaaaagattaaaaggaatatcatgaacagccctacacccataaacttggtaacttagataacattggccagtttcttgaaaaacgctatctaccaaaactcaaacaaggagaaatataatctgggtgggcctacatcaattaaaagaaatggaatccgtaattaatactcttccaaaacggaaagcacaagactcagatgttttcactggtgaattctaccaaacatttaaggaaaaaaaaaaaaatcaattctctacaatctcttccaggtaatagaagcggaaggaacattttctaattcgttctatgaggccagcattaccctaaaaccaaaaccagaaaaagatattaccagaaagacgatatcacacaccagtatttctcatgaacatagaagcaacgattctcaataaaatattagcaagtccaattcaacaatgtataaaaagaattatacaccatgaccaagtgggtttatcctaggtatgcaaggctgatccaacatttgaaaatcgactaatataacccatatttacaggctaaaaaagaaaacttacatgattatatcaataggtgcagaaaaagaatttgacaaaattcactacccactcatgtactgcagcaaactaaaaacagaggggaatttcctgagcttcataaagagcatctccgaaaagccctacagctgacgtcatacttaatggtgaaaaacgagatggtttcaccctaagattggaaaaaaggcaagaaatcccttatcactgttcttattcagcattgtactggaaatcctagctaatacagtaagagtagaaatgggaataaaaggcctacagctgacgtcatacttaatggtgaaaaacgagatgatttcaccctaagattggaaaaaaggcaagaaatcccttatcactgttcttattcagcattgtactggaaatcctagctaatacagtaagagtagaaatgggaataaaaggcctacagctgacgtcatacttaatggtgaaaaacgagatgatttcaccctaagattggaaaaaaggcaagaaatcccttatcactgttcttatgcagcattgtactggaaatcctagctaatacagtaagagtagaaatgggaataaaagtcctacagattgggaaggaaggaataagactatctttgttcacaagtgatatgattgtccatgcagaaaatcccaaagaaccaacaataacaaaaaaacttctggatgttagaggcgattatagcatggttgcaggatgcaaaaattaatcgctatcctatatgccagcaatgaacagttggaatttgaaattgaaaacaacactatttacatttaacccccccacccaccaaattacacaggtataaatctaacaagatatgtacaaggtctaggtaaggaaaacgacaaaactgtaacgaaatcaaagacttaaattaatggagagatgttccatgttcatggatgggaaaactccatgtttttaagatgtcagttcttcccactttgacctgtcctaatcaaattcccagcaagttaatttctagatatcaccaaactgattctgcatttatatggaaaggcaaaagacccagaatagcctcgcagtattgaaccaagttggagaactgacactagcccactttaggacttactgtaaaactacggtaatcaagacagtgtggtgttgctgaaagaatagagaaatagcggctgggcgtggcggctcacacctgtcatcccagcactttgggaggccgaggcgggcggatcacgaggtcaggagattgagaccaacctggccaacacgatgaaaccccatctctactaaaaatacaaaaaaaattagccgggcgtggtggtgggcgcctgtagtcccaattactcaggaggctgaggcaggagaatggcgcgaacccaggaggcagagcttgcggtgagccgagatcgcgccactgcactccagcctgggcaacagagcgagactccgtctcacaaaaaaaaaagaaaagaatagacaaatagatcaatgaaacatcatagagagcctgggagtagatccacccagtaaatccacccagatagtcaacccattcacccagatagtcaacccatctttgacaaaggagcaaaggcaattcagggcagacagaaaagcactatttcttttcaacaaatagtgctagaaaaactggacatgcaaaaaaaaaaaaaaaaaaaaacccagcaacagtgactctagacagtgatcacacaccgttcaagaaaattagctcaaagtgagtcatagacctaaatgtaaaatgtataataatgaaacttgtagaaatgtaggagaaagtctaggtgaccttgggtttggcaacaagtttttggataacaccaaaaacactgttcatgaaaggaaaattgataagttggacttcgtgaagattaaaaacttgagctttgcaaaatacagttaagagaattaaaatatgagccactgactgggagaatagatttgcaaaacacacatctgataaaaacctggtatcaaacaacacatggaaaataagggtgtttggatgggtagggcgggatgacctagggaggacatggaaagttagtttcttttttaaaactccagagactctcttctggagctccccttgccttttttattacagtcaacctgagatgggaactgaaaatatggccgtagttgtcatgaactggggggagccactactctgtttttaccctcattaaggaactttattgtgaaaggtaaaatcactttgtaaatgtgaattagaatagaaaatggaaattccttatatactctctaagccactggaaacttgaggcagagaagttttaaaagacgcacatggatttcctctgaaatatttgtaaacaccaaattcagaacatgttggttagtttaggaccataccaggctttagttgttacattgaattgtaaataacttatattcatgagcctggaattaaagaaattcttggtatgagaatttgacaactacttctggcttccaggagccagaacccaccttcgaatgggattttgaaataagccccgttgaagagacacacagatggcagaggccgcagcacaggctgtgagaccttcttcaggtttcggtagactgtcttcattacggcgtaaaaacatgtcagatgaaatttcagaaactatttccaaactcagtgaaggttcgtgacatctgggacgttgttgttttcaacacagaagttgaatgaaactgctacagaagcaaaatgagaagtgtggagaggagatgctgtggtggctgggcattctccctccttcccctccctcccctccttctctcattcccctccttccctccctgacctccttcccctccttctctcattcccctccttccctccttcctctccctcccctccctgccttacttcccctccctcccctccttcctctccttcccctcctcctccttcctctccttcccctccttttcctccttgcttcccttccttccctcattcccctccttccctccttcacctccctccccccatcccctctctgccctccttcccctccttttcctcctttcttcccttccttccctcattcccctcattcccctccttccctccttcacctccctccctgccatcccctctctgccctccttccctccttttcctccttccctccttcacctccctccccccatcccctctctgccctccttcccctccttttcctccttcacctccctccccccatcccctctctgccctccttccctccttcacctccctccctgccatcccctctctgccctccttcccctccttccctccttcacctccctccccccatcccctctctgccctccttccctccttcacctccctccccccatcccctctctgccctccttcccctccttttcctccttccctccttcacctccctccccccatcccctctctgccctcgttcccctccttccctccttcacctccctccccccatcccctctctgccctccttcccctccttttcctccttccctccttcacctccctcccccccatcccctctctgccctccttcccctccttttcctgtccttccccctgaggcctcaaagcccctgtgcctgagctgtggacaagaaacacgcctgcctcagaagctgcctggagctgggtgaaggcttccattcagctcgctgtcatgctctcactcagaggagagatcatgcagaaattactgaagtaaaatgctaatgtgttgagttaatgatcacaggtttacgttttataaaagacatcttaataatcaaactattgttgagctaccttgcgttttatcttgaattctctggagttaggtaatttacatacgtgtttcagagtacacactttgtttaagctgtcttagctgtcaacaaacactctaaattatgaattatgagttttatatctaaagctaaacattttgtactgtaaaatccagtgctacttactatgccctagagtaacactacaagagtaaaatctgatctcaatgatggatgtttgtttttcttttatgcagtacacattttggaactttatacccaagaatttatttgaacaattcagaagagtagccaacttttatttccttatcatatttctggtgcaggtaaggccggtcattgttttccatctcatcacatataaatctaaataagtgacattttattctcaggtaactgccacacggctaatgaaagagcaaggacatggtgcccctcacctatgattaatttatttattttcttaaggaagggcaaaatgtcttggttctgtgagatccacacaagctaaactacacacgacgctactttgggtttaagttggtgacagcctttcctgcccctttccttctagtaccagaggggaaatcagagctttgtcatcatttggacaagttcactgccaagctatgcatcgttacacttaatttactcttcctaagtgtgtgtggatgctctaaagaaaatccaggccgggcacagtggctcgcctgtaatcccagcactctgggaggatcacgaggtccagagatagggaccatcctggccagcatggctaaaccctgtctctactaaaaatacaaaaattagctgggtgtggtggtgcacacctgtagtcccagctacgcgggaggctgaggcaggagaatcacttgatcccaggagtgggaggttgcagtgagctgagatcgtgccactacactccagcctggcgacagagcgagactgtctcaaaaaaaaaaaaaaaaagagaaagaaaaagaaagaaagaaaatccaaagacagtacacatgaaaagagagtttaaaggaaagaaaaaaaagagtgaaaaaatatctcggggtatgagttagggagcaatgtgccaaatgtgttttaagaacagcactctaatttttctaaatcatacaaaatgctactgaaggactttaaaaatttttccaacattaaattattcaaatcatgtaattaaaatgtgacactgaggccgtggggtgaattaatacaaggcgtgccccgacttcagactgggtctgccactctcggtggtttccttgagcatgttccttaatttaaaaaaggtgccctcattttaacagtcagtgaaataggacgattgacttgctatctcccgtggtgggcagtcaggtgccagcaaaggtctttaaataagtcaaagcgaatgggaagtgctggctcagggcaaactaacctgcctgaagtcactcatttgtgtttttgaagatgattttacaattctctctttctgcagttgattattgatacacccacaagtccagtgacaagcggacttccactcttctttgtcattactgtgacggctatcaaacaggtaagcattttacagacgaaaaagaagcaatcgtcatcttcaccatgtgaattgcctttcattcaaagcgaggtgattggtttgttgtagctagttcacagaaaattcaaccaagttctagaaattcatttttataactgcgttagattgatacttgaagcgaaataagagatgttatataatttagttgctagtctggcaccatgcgagttcgagaagaaatctgtggttttcacatcccaaatcacccagagatgatctgatcagatgagtcacttaacctttctgtatccttgactgtcttgaccaccacagaacatgctgtttatggactccagcaaatgggatgctgttttttgtttgtttgtttttggttttgcttttttttttcatagccccagtaaataaggccagtgactaacatggagaagaatacatctcagttttactctctacgtatccattttatcacccccagattccctgtacacgtgttcagtccctccccattttctcctccccgtccctggcaaagactcatgtttctgtcaccgtagagtcgcctattctaaacatttcgtactcacggctcataggcggtgttttgtgactggctctttcactcagcatgatgttttcaaggtttctctgcatctgagcaggcgtcagcgcttcattccgtctgatgaatgagtcacggtcccctgcacatacctggcattttgtgtatcacgcgtcctctgtggatggacatttggggtgtttccactctttggctgttctgaataatgctgctgagaacatttgtgtttcacacccaccagattggctttcagatgtgaaaggctggagagggcatggcgagggaggcaccacgggccgccggcaggagcgtggcggagccaccaagcacagcagttggcaacatctgacacaggcagagatggggacacacagggtccagtgcagatgataaacatgcagctgtgcagtcagtacatggggcctgtgtgtcttcactaggccagagccggccgtgcctaccgggatacgtgaactaggatattcatggtggctgtcattgattagcaaaggactcgggcaacctggtgtccctccgtaaggaaatggacagctccgccgcggtgcatggcagaacacagcacagtaacgaaacgaactgtgctgcctggagaacagaacatgagggagactcacgcttcccaaggacgcgctgcctgtgactcaggcagtttaactcctacctgggataaggcctcacttcatgtcggtggcaggctcttgcaaacttcaactttaagcaaaacgatgggttttctcatcaacttcacaaggaaatggtgctgaaggaaacgatgttactcggggacctgccatgtgtcctcgggcccaaagtcacagtttccaggaacccatcgtggagattaggtgagggcgtcccgtgctatctgtgatacatctgtgtggtaggagcagaggctgcagacaggaaggagacccctgagcctctcaaggggagcagagagaaggggcgcgggggtgcagaacaaggggctgaggctctatggctctgttctttccagcctggccccaggaggcaggcgtagcactgttcttcagcgtcctcttctctgcatttgttaaggattccatccctcccgggactctactgagcaggaaactcctgagatctccaggagtgtcctggaggagaggagaggagagcgtggagtagggagggcggctctgaagacgcatctgggccagagaggcagcggccggggagcccgagcccccatggatgcagaggctgcctctctacactgtgcagaccacggccccagacaacatgtggtgtcctcggcccggctgtgccccatccctggctgtgtcccctcccatcggcctggctatgtcccctccctggctgtgtcccctcccatcccagggcagtgggcgggcgttttggggatgttaagagggggtcagggcaaggcggcaaatgaacagagctgcagttctgggccccatcaccagcacccctgcctctgcccagaggggtctcttcctctcccgcgcgtcctgctacccagctttcactctggggatggccttgcttcccctactgctggtctggacctgtgtgtgccagagcccccccaccccctcgaccttcccccactactgacctccttgtccctcttccttgggaacagcgcctctgtccgcagctgggactttcccaaatggcctccccacactgtggctccagcagggctgtttgtgctggggtccccatgctcccggcccctcctcgcttgccttggaaagccccctgcactcacagaggcctccctgattttctcttaggtccccgcctctcttttcacaccatctccccgctgtctccgctgggcactgacgggcatctcactgtacctggctctgccgccgccatcgcccaggtcctgccagagcggcctttccctgtggcacccagcctcccctgctatgtgcagggcccctccgatcagcccatcacatgcatgggcctccacgtgtccttcccgtcccagccaggctggctggtgggcagtgccagcccctggggactccctcaccgctgggcattcctgggcacctcctctttggcgtcttcccgcagcccgggcgctaggcttttcggggatcctgggtgtctctcacctgcattgaacttgcagttatttctgtttcttctccaccaatcctgagagcagcagctctggggacaaggtctttcgtctgtgggcccctggtgcctggcacttgctgagcatgcagttggtgctaaataagtgtgtttaatgaacccaggaatcatctacccactgccaccttccaggaagactgttcttcagtttccccagaaagagagtatttcagcgatttgggaggaatctctgaaaagcaatcagatgccacagtgtcacttattaatggtcacagctggagaaagctcgcacgtttggatatccatgcgtcccaggcttcttaattctccagaagctggaggttttgggttacttgtttatgctcccttcggaggagactccagtcacagggccactgatgccgccacgtggcccacagggaggaggtccccagtgagcctcctgccccacaggctcttgcaacctacctgcagcgggcccgtggcacaggcttcctgccgccatcctgtgtggttgtgtgtctcagcacacatgcagtgggcccgtggcacaggcttcctgctgccatcctgcgtggttgtgtgttgtgtgtggcagagctgtgtttccaatttcgacactcattagatgcggtggacgtggacgcccataggcccctggtgtgcagtctctcacatgctggggattgttactgagaacggcattccccatccttatctaaggcacctgcacccagcaacgccaaacacaaaggcacgtttgtcatcccaggaatcatctgtgtgcagcatctcctattgtcgcttctttcaagatgccacctgactgtccaaccagagggtgtgccttcgtagttggaatcggagtgcacgtgtctgcgccagtggaaggcatccaggtccgtcagcgcggccggggtcagggttagctcaggctgcttttccagccccctgcctgtgcgtgcacgggagtcacgatgggatgtttcccgcgtgggttactcagatgcggaaacgcacagagagccttaaggctgctgcgggtgtcacagagtgagccggcgtttcaccgagagtctgggctgccagatctcataacaatcagtttttaatgaaagagaagaatggccagtgggggcttttccaagtggaaggttgacactcagcgggtggaaatgtaactggctccacgtcttcggggcttttcggtgtggatgtgaagagcctggaaggcttgctcatcatttcattcagacacttcttttttaggaatttatcctaagtccatgtcatgaataggcacaaaaagtacagttgtatagtacttatacacacttcgatgagcatctttctccaacgtcttcgaagttctacaactgcagacatttaaagcagctcgcgttgccatggaacatgccgatgctctgtcaaggatagtgtgtgtagtgcatcctcatgctgaaaaatacacccccacaggcttggattatgcttagacataattaaacacaagccttctgtctctccctccctttctcctccttccctctctccctgcttcctctctcccttctttccttcctttttttagggttatgaagactggcttcgacataaagcagacaatgccatgaaccagtgtcctgttcatttcattcagcacggcaagctcgttcggaaacaaagtcgaaagctgcgagtaagtgacacccgacacatttacgctggtgaagtccagtaactgtttaaaaaataagttttacccaggtgcagtggctcgcgcctccagtcccagctactcaggaggctgaggcaggaggatcgctgagcctggaagtcggaggccactcaggaggcttcaccgtgcctgtgaatagccactgctctccagcctgggcaaccgagaaagaccctgtctcttaaacatttttaaaatacaaataataaatgtttttaagtttttattttctttggcaaaacagactgagatgttttttattgggtgtaggcccaagctccctacttcttttttttttttttacctttaatttttatttgtttatgtttaatagactttttagagcagttttaggttcacagcagcattaggtggatgtacccactgccccttccaacacacacacacacacacacacacacacacacacacacacacacagcctccctctgccagcatcccacaccaggattggtggaatataaaatcattatcactgcccccatccccacacacaccctccctctgccggcatcccatgccaggattggtggaatttaaaattattatcaccacccccatccccacacacagcctccccatcaccagcatcccacgccaggattggtggaatttcatcccacaccaggattggtggaatttaaaattatgggaacacacgaaccaatcaagacagagaaagattggaaacactgtttctaaaatttgttttagaataaagtataataaaatcatatcaatataaactcgactaggtggaaatttatgaaaattggaacagaaaacttcattgaagattgcatttttttaaaaaaaatgtatttatttattttttaagagacagagtcttgctctgtcacccaggctggagtgcaatagcataacctcagctcactgcaacctccgcccccgggttcaagtgattctcctgtctcagcctccccagtagctgggattacaggcgcctgccaccacacccagctaatttttgcatttttagtagagatggggtcttaacaaaatgttggccagactggtctcgatctcctgaccttgtgatccgcctgccttggcctcccaaagtgctggaattacaggcataagccaccgcatccggccaaaaaattgttttttattgatgtataatagttgtacgtagttgggggtccatgtgatattttgatgcctgcacaccaatgtgtgatgatgaagtcggggtaactgggatgtctgtcacctcaaacattgattctttgtgttgggaatattacagttcttcttgaaggctgcattttaaatctgtttcaaatgaattatctgtgtaactaatatctcaatatgtttcaaaatatgtgattaaattatttaaatgagatagtttcaagcttatactagtcatttggaagcacctttataggtagaaaccatgagtgtggtttttcacgtttgtgtcaaggtagcggtcagcagcctgctccagtcccccatctgatgtggatctaggtgccaggcccacaccggccccttcctgcccccactggtcctcgtgcaccctgcctggctctttccaactcccacgcctccctccctcgtgcagccccactgcctccctggctgttttcccagctgagccgtaggaggtttggtgagggaggcagggagcaccccagtcctgtgcatgtggagagccaggtgcgttccagaagcctggagggagggcctccaagcagcccagccagcctgggctcagtgaacctctccggacaaggccgcagcccttccctgtccagtgggacgggaccccaggaggcactcagaggcccttcagaggagccagcatcaaccactaaccccccaccgctcaccttgctctcactgttctgtgtatcacacacgtcaccaaatgtacttttaagcatttaaacattttcacttataaacgtgctatccaggtgtttaaatgcttctgagacagcttttcccttcagtgagttcagatgagtgatgtttccctagaggtcgggggttcagagagcagatggccctggcctggggaacagccgcgagctccatgcctgtgtcagcaggcatccggtcccaggccttcaacgccatttcctttaatgattatatttcccttgcaaagccttcatacttgtagctaaacatctttcttaaaaaatagacctaaacagtgtctgcccacagaaaattgaatttttaatgtatcggtcttctgtgggaaatgccagctctgtatcctgtgtgtcgtaaccaagaggatgctaaacaggctactcaggacgagaaagaaaagatcaggcttttcctacaacggcagacatccagcttccatcggtcgtaatggctcaggcctttgagagtgctagagcgtcctagaaaagcagtcctttaattagtttttcttttttaattaaactttttatttcgaggtaattacgggatcacatgtggtagtaagaaataaaacacaggcatcctgtgttccatttgctcggatgtgctgcccagctctaagattttgtcatctcaaggatatgatataaagagaatcctgcagcctgtgaccttttggggttggctgttttcaggcagtctaattccctcgggattcacgaagtctgtgcaccagccattccttcccttgtattgctaaggagcgttccatgatgggggcgtactgcagtttcaccattcacaagttgaagggcttttcgatttttctagtttggggctgttatcaagagagctgctatgaatatttgtgtgcaagttttcttgtgaatttagttttcatttcttttgcataaaagctcaagagttggattgctgggtcatctagcatatccacgtttggttttgaaaggaactgccaaatggttttccagcatggccatcccatttcattcccacgcacgacgttgccagcatcttcaccagcactgggtgttactgctgttcctgatgtctcggtgcagcttaaatatgtccctgacggctctgtgggacatcttttcacgctcgtttgacatctgcatatccttgtcagtaaaaataactcttcatgtcttttatccatttttctagctggattctttgagcttctttttactgttaaatgttgagaggtcatataatctagatagtaatactttgtcagatatatgatttttaatactcagcaggatatttcacaaagcaaacgtttttaattttgttcaagtccaatttcttgattttttttttcttttttttaaaattattatttcttttgagacagagtcttgctcttgttgcccaggctggaatgcagtggcgcaatctcggctcactgccacctccacctcccaggttcaagctattctcctgcctcagcctcccaagtagctgggattacaggcgtgcaccaccatgcctgtctaattttttagtgttagtagagatggggtttcaccattttgcccaggctagttttgaactgctggcgtcaagtgatctgcctgcctcggcctcccaaagtgctgggattacaggggtgagccaccacgcctggctgattttttttttttcttttgaggactgtacgttcagtgtcctgaatgaagcattctttgcctggtcctagacccaaagactttctcccatgtttctttctaaaagtgttatagtttcatgttttacatttaagttcatgatccattttgagatgatttttgtataaggtgtgaggtttcagtcaggtttgtttctgtccttattattttgcccgtggctgtcttgtcgcccctgcaccaggggatggctggctgtcccttttccacggagtggcgcttgtactctgtcccagtcagttaaacacatttgcatgggtctgtttctggttccctggtctgtcccattggtctccatgcccatgcccaccaatcccacactgttggtcactgtagctgtctcagaaggctggacattggggatacgtattccttccccctcaatcttctttttcaaggttgttttagctattctagagcctgtgccttcccatataagttttagaattagctcatttatatctataaaaatccttgctgggattttgatagggattttactaaacccaaaggtccatttgggaagagtaaccctctgattttaaagtctcacaaattcgcagtgtgctgtgaccatcgtgtagtgggacagagacctctgtttgcagtgtagacagaagcaggtgacgccctgatcctggcatgcctcccgagtggcagtgagactggctggagccctgcagtgactcactcaagggttctgatgatcgtttccccttcagacatgcagcccagatctgcaatggcttcctcacccttcagacacacagtccagatctgcgatggcttcctcacccttcagacacacagtccaggccactgagatgccttcctcacccttcagacacacagtccagatctgcgataccttccacacccttcagacacacagtccagatctgcgataccttccacacccttcagacacacagtccaggccaccgagatgccttcctcacccttcagacacacagtccagatctgctatgccttcctcacccggcagacacacagtccagatctgcaatgccttcctcatccttcagacacacagtccagacctgtgatgccttcctcacccttcagacacacagcccaggccactgagatgccttcctcactgatgaaataaaatggatacagacacaaactagaccatgacctttaattaaaaacccacatgatcaactttctgtgattgatttttactttagtttttgaaacattgttgccacttttgctttatttgtcctcatgctttgatgatctgggcagcgccttggttctgttgatcaggaagctctcagaactcgattacctggttcataaaacgcctagatttagatcaaagcttctcacaggagtacttcccacttggccacgctcacagaacactccaactcgtcgtcttggtctgaatcaaagataaccttgttacaggtgtttgtctgtgtttttgctgcggaagttagaacattgaaacctgacctggtctttccttggtcccagcagaatgtctggcaagagtcttttcctgaaaccgtgtccacatccccgtgtcttcctgtgaatagatgagcagcttgagggaagcggtcccacaggacgggcaagctttcacggaggggctttccattgaccatcctttctgctttgtcctgtaggttggggacattgtcatggttaaggaggacgagacctttccctgcgacttgatcttcctttccagcaaccggggagatgggacgtgccacgtcaccaccgccagcttggatggagaatccagccataaagtaaggggccttttcattagactccagggcaggatcttcctgtcctgcttcggactgtgcccatgcggccacagaaactaacatcctgtttgaaaagtcaccgttttcatgtaacccagggagttacaccagccatgtttttcctcacttttccttcctcctattttccactttcttctttttcctttttaaaaataaattgtattgtgtatatttgaggcatatattatgatgttataagatacatatttttatagtgaaattgttattagagtgcaacaaattaacacacccacatctcactgatttcccattctctcccctggcacccatgcaggagcagccataacctactcgatgcggcaaaaccctgagcccagcacgctcttgtccactcagtgcggcaaaaactctgagcccagcacgctcttgtccgctctagtcctcgtgttgtacgttgggtttttggacagttcatcctaaataatgctaccttgtgttttttgacctacacctccccatttccttttcactttttctttccagtctcaatgtctgtaacaaccaattacctcaggttaacaaaaataacttcagtgttaacctgtgtcaattagctaatgtaccaaattcaggatttaatgaatagattgttggaattttaagaattttcattttattagttaaaattagtgtgaaaactggcctagaattatgtgaaaagtcacacacgattctagattttgcctgttacttcaatgagtgtctttttgtgaatgtatcttagtcaggattttctgaaattactacataagtaatttcctgcactcagtataaaattctgcacaggcagttgatgctacaagaattttaattgtcaatcatacaagaaaagatatagcaccattaattttaagattcttcttatttaaaaaatcttgaagtttctaaggagtttatgaaagtgagcatagctcagtggattcaactaagtcatcagctcacaaaattgcaactctaaaatggtatttaggtaatacgtatggatataggccatttctactatgagatagagacattttctttacaaaatcactgaaggatatgctagtctttcatagataattcatgatatgtatcatgaattgatagatgaaaaacctatggatctttttcagttaaattagctttcacattttctgtgtagcatatcccaggagaatgaacacgctaacctaaaagattgtcagcagtttctagggggtcggaatccctggatgattcaggtattcgctgtaagcgggtgttggtccctctggaacctgggaggaggttaaggttccatccacccagagaccctgtgagcccttcacactctctgcagccagtcgctgcctttacaccccttccctgcagactgtggctggtcaggctcagatgagtcccagccatgctagtgaacagatgctgtgggtctccagatacaccatgtttgtccagatgaaatgttgtagcagttgtggaagatgttaaaacagctattgcactttgaccttttgtggctttgcagtttgcattatagttttgtgttctctaatgtcctttttgtgcattttgtttagcttgagggactggaattatttgagccctttccttaaaagcagagtaggggcgtgggaagggtccacccgacctctgtttggatcccgtggggctcacgtgactgcacaggcctgttcacttctctggactcttcacatttgtgaaatggggacaaccctatctctcaggggctcttgtgaggataagattagaaaattcctactgaatttagaaaataagcgccccctgatttgtgtgcttggtgacggggcagtgactgttggtgtgcttggtgacggaacagtgaccgtttgtgcgcttggtgacacggcggtgaccgtgtgtgcgcttggtgacagggcggtgaccgtcggtgcgcttggtgacgggcagtgactgttggtgcgcttggtgacggggcggtgaccgttggtgcgcttggtgacggggcgatgaccgttggtgcgcttggtgacaggcgatgaccgttggtgcgcttggtgacggggcggtgaccgttggtgcgcttggtgacggaacggtgatcatttgtgtgcttggtgacggagcagtgaccgtgtccccctgatttgtgcacttggtgatgatgcagtgattgtttctcccatttgttctgactcctgtgttttatttgtccaatactcttccactagaaagaaacacaggaagggattcagagatgctgttgcctcttcgcagatccctgggcacaagtttctcctctctcctcccaaggcagggccggtgcagccctcatgcccacctcaggtgggccttcagccgacctgctggtgctcacagatgctactgaggtcaccaggcctcaaaatgtgttctgagagcagcagcatcggcatcactgggcaccatattagaagtgcagttctcaggccctccctagacccactgcatcagaaactctagggctgagcccaggaatcaggtgcttcagaagctctgggtaaaactcacgttgagacaggcttgaggagccccccggcccaggccatgtgaacagttaagtagaaggcctgtgccacccaacagcaacgggcacaggcaggttgttgccgagaagtgaaaatgaagtgaagtgatcctgtgaccgctccccgtaaacaacagggcgttctgtaaaaggaaagggatatttcaggtcctggatttgtttcctaattaatagctactactatgacagataaatcagtgtctacccttgaagaattcgagcattgctatctgtcctgttagttttaagtggaggacactgggtaagaatggaaggatgagaattttctggcacctgataggtgcaggaataacagtagtaccttatctttctgtaactattaaacatttacaaactcatagggtcagccaggctttgtaatcacttggttggaggcaccagcgtctgggtttgtgttgaccgttttggcggtgagctcacatgtcttgtgcatttgtagacgcattacgcggtccaggacaccaaaggcttccacacagaggaggatatcggcggacttcacgccaccatcgagtgtgagcagccccagcccgacctctacaagtaagcgggagctttgggttctttagaaacggttttttatgccctcaacattgctcttgctttttcaccccaagtagtccagccatgtggtggtttggaaagagaatgtaaatcactgcttaaagattaagactgagtcaaaaatacattacttatttattctcatagacttgtaccactcagatttgtagctttttatacaaatatttgaagtggcttcgtggaaccatatttgtgggaaaaaaaaagaataagttttctttattttacggaagacgtttgtaaactgtgggttaaggaaaatcaccgaagccatgagctgatcagaacagaaagtacgacaagggaaggggctggagcggggctgctttagccgcacacggagcgggccaggtgaagacgtgtggctcacagaaggcaggtgggccaggcgcgcgcttcccgggggccgctgggcgcgtccggtcagtaacgtggcttttctgtcgccaggttcgtgggtcgcatcaacgtttacagtgacctgaatgaccccgtggtgaggtgagtgcctctgcggatgccttggccacggtcacctcccttgttgcgttagaaatgcattctttgacggacaagggtttccacggcggctgctctggtagatttggaaggtggagttccgctttcccacagggccgggctccactctcgtctctggtttgtctcaggcacacatctgtgaatgttgacaagttagtgatgctcgtgaaacaagttttcgcgcaagactctgccgagagggtcgtctcacaggccaggaggcgtcagggtcccgtggagcagtttcaaagtgaagggcggagtacagcttccctgggagaaatgccctttcatgattcgggtactgatttgtcttcagatatgaaattgaaagacttctaatttggaggccgtttttgggaatctgttcatccactcaccatcattctggggtgcattactggctcaaggcctatctgaggctcacacctacctgagaaggtggaatcggtagccggggcaaggccgggcagctcacggttggctgctgtgccttcccattcaccagcatggacccagcggcagtcacatcgcatacccatgaggaaacagcgaccctcagacacctcatctatggccccgaggcagcctcggctgagagccagcctgtgctgagcccagctctgagcagcacccacctcccaggcctagggatattttctctgacattatttcaagatctagcatttgttgctgacgagatatttgaatgtcacagtttagggaattggctttcactggattttaaagttgcatcttcttcataaactccacttgttagggaaatgatttttcttccattgtaagcactctccaagttgttgatgtctgggtaggtacagcattgtgtgttaaacaacacatctcccagacacagaaacacactcactgggaaactactgcaaagtgaatagttcctgaaatgcttagctccttgtaagtctccaggagctactgttttaagaaaaccatttgtgcacttcttagcatgtgcttgttatcattacccatcagcaggctaggaggtgctttcgagaactgatagtgaccttgccttggtttgcctacgtatatactgttctaaaggtaaattcctccttactttggagaaatctcttgtatttctgtgtgccgtgagaattaatttgtgtttgaacagacttaggcttattcatattacctatgggatgaatccaaaatagtaaacattgcaggcttttcatctttatagttagaccaagtttattgctgaacaacttgggacgataattgctaatgtattttgcattttgatactaactctggtttcacttttattttatatattttattttattttattggagacagagtctcgctctgtcaccagtctggagtgcagtggcactatctcagctcactgcagcctccacctcccgggttcaagcaattctcctgcctcagcttcctgagtagctaggattacaggcgtgtgccaccatgcccagctaatttttgtatttatagtagagatggggttttgccatgtcggtcaagctagtctcaaaacgccctcaggtgattcacccacctcggcctcctagagtattgggattataggcatgagccaccgcgcctggcctagtttcacttttaaatatttatggtattccatagacttttaatatttagattattgaagatgtttgtaaatttgtgatgtggacagttaagaattacgcacccaaattctcaatccattcagagtgacgtttcttcttccttctgtcctaactagaagcaaagtacttttccaagtaaattatttttagacttccctgagtcactttttaaaaacgctgtttgttttcgtaaacacatggcaggaattattataagtgtgttgcaaacagaagctgacagtccttataacacagccagacaacccatatgcagcctgggagctccatctttagtgattgccggggaggacgcgcgtggagccctcagccgcagcctggggtagacagccccactctgcctgtcttcagccggatgcagttctgaggtctatcgaccaaatatactgcatgcattttacattcataatattcagtaggttcttaattttccatgatagaaggacagtaaatacaatgataaatgaaaagcaaacttcagcaaacacttttgaccctttaccctctgaagcaatcctctgaatgttatcaatagcaaaatttatacatttgaatcttgctgcttatttctcccttactacttaggaaatgagaagagattatttttccatcagcagggaaccctgttatatcaagaatataagcccctgatggcagagaccctgcctgctgcttatgtggcttcagtgcacagaacggggcttgttcttccatgtgtgagatttttaagttctttggctgttgcttgttttccccccaaagcagccatgcatggattgtcccagatttacatgtcccccccattcagaggagctttgcagtgtggctaccagtgtttctaatggccagatagagtatcagcctttgtctccaggaataagactgtgtttcatgggactccctgaatctcactgaggatgtaatagaaacaattgaggctgggcatggggatgcccaactgtaatctcagcactttgggaggccaaagctcaagttcacctgagcccaggaggtcaaggctgcaatgagctatgatcgtgcccccagcctgggcgacagagtgagaccctgttgcaaaaaaaaaaaaaaaaaaggaaacagttgaaagttgagtgacttttattttatttcacatccacccctctttagcctttccagaacattctgggaccttccagtgcagctgttctcaacctgaggcttgttaggagagggctgctgggccccaccccagggtttcaggttctgactcggtaggcctgggacgatcttcctgactagtgtgatggttcctgactggctccaggtgctgctgacggcactggtggggccacctcagggacccctgctctagaggtctctcggggagtgttgctgaggctgccgggcgcagctcagtgggtctggatggggcctgaggtcccgcatgcgccaatgggaggcccttgccgctactcctggagccatgtgttcgtcccccaaagataagcccacatctgttcacatggacctgggctgacttaatcatctgaatataagcaaacctccgtgtatgccatctcctctgaaaatgagatctgctgagcaaacaagtgggtttcacgtctgcctcttgccccccgccctgcccacttgccttcgtgtccgcatcatttctgatcatcgtatctttacaggcccttaggatcggaaaacctgctgcttagaggagctacactgaagaacactgagaaaatctttggtaaatatttaattaattattaaccattgcccctaacattaaggatgcatgaagcaaaagttaaaacccgcagcggaacccgagagcgtttcttggcaccttgaggtgctggaggctttctggccgcgcaagttctgccccactgagatttgatcagtgaataagtgcaatcctgaagcagcagcatcagagaatacggcttacggattaaggcctctagttttggattcagaaacagaacattgcatccgtgaaggaatttgtgaagtttagttgtgcaggaaatgtttttcatgtctgcgtttcttgactaggatctcccatttcttgtgggttattgtctgttttaattgaggtaacctttagaagtatacaagtgtgccccactgtcagaaaatgctgtgcaggtgttcctcagtgtccttgggggactggttccaggatgcctgcagatgccaaaatccacggatgcccaaggccctatttgcatgtagcctacgcatgtctgcccctgtagttcacatcatcttagattacttctgatacctagcacgatgtaaataccctgtactgtttttatcgtctgtattttgtatcattgtattgttatttttattggggatttttttcaaatattttccatccccagttggtagaacctgcagattaagaactcgtggacatggtgggcccagtgtatattaagatatgaactcttaaaaaatgaagcatagattgcttcctatgcatgaagaagggtctttatcctaaggaatcaagtgctagtgttatgtggctatggacactagcttatgaaattaaaaataggattcgctttacccaagaattgattttccccgcagctgtgtgtaactcaccataaggcaagacacacttgcgccctggtcatcacccttgctcttcctctctgtaggtgtggctatttacacgggaatggaaaccaagatggcattaaattatcaatcaaaatctcagaagcgatctgccgtggaaaagtaaggctggatgcgcgtgagaacctgcaacttaaaagtgtcattacccactgtagaaatggaagtagcttcctcttggccttattggcagttcctttgccactgtacagcatcttagtaactgcagagctgaccattcagatggtctttcttattttgtggtgaggtggatggccacacccctccttcctgctctttctaacgcctgataccaggttcacagcgctgcctcttacggacgccctgacgttccggttctgaaatcagttcagtatccaacagctcctctcaccatttcatgaaaaactccaaatgggcttacttttaactctgggatttggtcaaaaccacgtattctctgctatggttttacaaaggaaagcgttagcagagagaacagaatcatcttttcattaaacagtaaagtcctgatgataaatatgtcaggatggtagctgaatttgtgctggaaaagaaaggcttcttcctgagatctgctaagaccttagttaaggatctgtgcttttcctgtactgaggacacttcctttcagagttatttacttttctccccctcctttcctccctccctctcttccttcctctcctttccttccttcctctacagtggtgggtagtcactaagttttgaactaatttgttgatgcttaatggtagaaattgatttctggatgtacttttcaatgacggaagtccaggcagtgcagaagcatggtccgcagtgtggctgtgagcagccctctctctcctgcttgtggcactttaccccgtcttggttcttacctttgacctctagaagtacgtgccagggaccatggcatggacgcaagtgcagaggacccaccgtggtgcgttgagggcgaacacatcactgtgcccttcctattctgtttcttcacgaggtgtcatcttgatatctgtgagaaggaagtgcagagctcatttcctcagggaccagtgatcacctctgtccttttgttttagatcgatgaatgcgttcctcattgtgtatctctgcattctgatcagcaaagccctgataaacactgtgctgaaatacatgtggcagagtgagccctttcgggatgagccgtggtataatcagaaaacggagtcggaaaggcagaggaatctggtatggagaatcactgcccttgtatgatccgaggtgacctgtgggccattattacgaaaatgtggtgcaagaaaaagatgacggtgaatttactgtaggcaaaaagcagcttgattgattcagtctctgtgatagatgcattcactgaaatttaaagtctcagtggacaccagctgctcctgccatctttggatctggaaaggtacaggttcccacagtgaaatcatcaggacaataccttaaatacttgcactgtgtcctttgtttagagagtgctgagaaaatgcttgttaatgattatgagataaatggcacatatttgtggtaaatacttggaaaaaagggtctgctcccagtccagagcagggccatgtgcaaaccgagacctgtgtccactgagcctagagcaggactgtgtgcaaacccagacctgtgtccactgaccctagagcagggccatgaacaaacccagacccatatccactgagcctatagcagggccgtgtgcaaacccagacctgtgtccccactgtccagagcagggccgtgtgcaaacccagacccatatccactgagcctggagcagggccgtgtgcaaacccagacctgtgtcccctccgtccagagcggggctatctctgcatcatctgtccttcccacaaaactaacatggccccacagatcaggataaaagtatactgaaaagtcatttcaccaggcttagtttttacatctgtaggttgttaccaagtatgttttgttataagagacacaaagagatcccatgaatatgcagaagtaaaattgccgctggtgtctggttggcgtgtctcctgtcatcggcacatgcttgtcttaactcgtgatttaatctccacttgctggcaggacagccccacagctcagcccctggacccggcaggtcctggctcagagaccaggtgacccagtggctgccttccgcccatagtccttgtctttggactctgaaatcttgtatttagtagtagcgctcgtataacttatgcctaagcctgaggtgttagagcagcatgttggaggcctgctgtccctcctggtggaggtgctgacccgcaccttctgctcttgcagttcctcaaggcattcacggacttcctggccttcatggtcctctttaactacatcatccctgtgtccatgtacgtcacggtcgagatgcagaagttcctcggctcttacttcatcacctgggacgaagacatgtttgacgaggagactggcgaggggcctctggtgaacacgtcggacctcaatgaagagctgggacaggttggtgtctcctgagtcatctgctgtgatttattaacatctgggtgagtctgcttcacgttcctcaggtcctgtgcctgtcatccgagcgtggctgtacctgtagctggcgtaagacagcagcagggttgttttgaaccctatttatgaaacagtcagccgtgctgttacatttacaacagatgcagaattacctgcacttgctgactcctggaaactcattggagcttcctgggcagaactctttctgtgtgcaggtgtgaatcaaggctggtgggtaaaagtggctttgccagccttgcactctgcttctgcacctgatattcaagtctcatggcgagctgggtattttcactttaaagatgaacaaaccagattttcagtgacttggtggattgcaaagagttcagacgcctccattcagatcctgctgctgcatgatggctgcgggagctcgggcttcaccgccacacctcgagtgtctcagtctgtgaaatggagatgataacagatgctggccttacaggattgggttgcagattaaatgagataatggacacaaggtgcacagcacagagtctggtgtgaccaccgccctgccaccgcaccaccgggaggcacacaccagacctgctggcttgaagggagctagggaaagacccattccctgggtttccccagcctagagcggtgaccttccctaccttcccagccttaacgttgcagagtgcagggttgccggagcaggtaccagtaaacggtaattggatttttcggaagaaatagcgattttgaaggatattttagcaaacaaggccactttagacaggtagctgaaatctccatctcgctcccagatgacagcctgtaaatagacttagactctggcagatacagaggcctctctctgcctcctgtgaggaaggccaacaaacggaaggatcatgttccacatttgatgagtttgacttttgaatgtgttcctccagcatgtcccatactcctcacagtgctttattgtttgagtcagcaatgcgcaaactataatttagttgttcaatagtcaggtatttttatctaggaatattctatctcctttgcaacaatagatggtacattttgtgagcttctgataaattctttgggaaagaacttttttctgtaacaaggaaagtgcccagcagcgttgagtgtgggggaaagcgcccagcagcgttgagtggggggaagcgcccagcagcgttgagtaggggggaaagcgcccagcagcgttgagtggggggaaagcgcccagcagcattgagtgcgggggaaagcgcccagcagtgttgagtgcaggggaaagcacctagcagtatggagtgggaggaaagcacccagcagtgttgagtaggggggaaagtacccagaagtgttgagtaggggggaaagcacccagcagtgttgagtggggggaaagcacccagcagtgttaagtaggagggaaagtgcccagtggtgttgagtaggggggaaagcgcccagcggtgttgagtggggggaaagtgcccagcagtgttgagtaggtgggaaagcgcccagaagtgttgagtatggaggaaagtgcccagcggtgttgagtgtggggaaagcgcccagcagtgttgagtaggggggaaagcgccaagaagtgttgagtgcgggggaaagtgcccagcggtgttgagtgcaagggaaagcgcccagcagcattgagcacggcagatttcttctctgccctcttcagtccatctccttggagttctgcaaaacagaatttaatttctgttgttctgtcctgaccaaaaccaggctccagcttggaggctgacctcctcgtacacaaagaagtgtgtactgttgctcacgggggacacactgaggtcaagacgggtggacaagcccaaaaggcaggttcatctgaccgcagctctgtgggtaaacgcctgtgcccactgtcgctgtgcagtacgataacacgacttcttttgtatgtgaaatagattcacccaccagtcaagcgtctgtgtccacaacagaaacaaccatctgccatggagatcctgtgccagaagcacttcgtgcaccttctctgtgtcctgtgcacactttatgcaccttctctgtatcctgtgtgctcagtgctattgcgccgtttctcaaatgagaaactgagtcaggagcaggcagtgccccgttctgcgatgcagtgctgcctcccgagcacgagtgccttggaacacaaatcttgcttcaggccaagttagcaggcaggcgtgcgttgtagtgagggccatcttttgttcctagagctgagggtgatggcagcattgaccagcactgggcttagggttgactgtcccaccaccagaaaagaaaattgcaggccaggacccctgatgaacaaagttgcaaaaatcctcaacaaaatactagcaaaccaattcagcagcatacaaaaggatcataccccacctgtgggatgccagggtggctcaatgtgtgcaaatcagtaagtgtagtgcattacgtctgcaaaatgaaggacaaaaccatatgattatctgtgatgcagaaaaggcattggacaaaattcagcatcctttcataacatctctcaacaaattttaggtatagaggaatgtacctcaacacaataaaggccataaatgagaaacccacagctggcaatggagaaaaggtgaaagcttttcctctgagatcagaaagaagacaaggctgcacacattcaccccttctatttagcatagcactggaagctctagccagagcagtgaggcaagaaaaagaaaaggcattcgtataggaaaggaagaagtgaaattgtttgctgatgacacaatcttatatatagaaaagcctaaagactccaccaaaaagcttttagaactaatcaacaaattcactaaatttgcaggatacaaaatcaacacccaaaatcagtagtgattctatataccagacaagaaactatttgaaaaagaaatcaaagactttaataaacttgcttaatagtaacaaagcaaacaatcttatctctgcgtcccgagctaacagaactgactggatttgtgtccagaggttttaagcttttgtttccacgttcttaaaactgggataataacacagttgatgtgttaataacagttgaagattaaatgaggctctgcccagtggctggcacaccctgagtgctcagtaaaggtcttttataattaattttttttattgttcactttcatggtcatgtttcctagaaatatgccacctatttagttatagctaaacaggatgataaaccaaacctcttaacatttgttatctcattcttatccattttacccttttaaaaatgcttttagggccaggcacagtggctcatgcctgtaatcccaacactttgggaggctgaggtgggtggatcgcctgaggtcaggatttcaagaccagcctggccaacatggcgaaactcccatctctactaaaaatacaaaaattagccagacgtggtggcaggtgcctgtaatcccagctactctggtggctgaggcatgagaattgcttgaacctgggagacggaggttgcagtgagccgagatcataccactgcactgcagtctgggtgacagggtgagactccgtctcaaaaaaaataaataaaaataaaaatgcttttgggattgaaaagcgtttattctaagttacttcaaagtcctgtataagaagggtacacaggttgaatatcccttattcaaaatgcttgggaagaagtgtccctgtggacgcgcccaagctcagtctcaagatgctgccgtgcgttccagaactcctaccttcagttattcacgataaacgtgtgacccatgagcttatctaaaatcagagtttaagacgggttgtatctttaacacatatcacagttttctctgagatttgttttgtccttatttgcttgaattttaccttctcaaccttacatggtattgtaggttttgacctccaagactgtatagagtaagttcgtcctctctgtagccttggttttttattgttgttgttaagattcgggacaacccacttacactctgtcttcccaaacaaatggagccctggccccacccatgtctctgtcccggggaatgggactatgagaccatactctgttttgctcccaacccagagaaggtatcccgaggcctccccacccatcctcctgaattgcacctgccaggactgcagggtcctgttggacgctgggaaggaggatgaggcaggagcatggctcagcccagtgagggggtctgtctgggggaaagcctttagaaatccaccgcctattcaagtcacagtgggagctggggaggaaacacggctgctgtgtgtctgagtcggggacgtgcgggcctccctcagagcgccctgacttgctgtgccctgcccgcaggtggagtacatcttcacagacaagaccggcaccctcacggaaaacaacatggagttcaaggagtgctgcatcgaaggccatgtctacgtgccccacgtcatctgcaacgggcaggtcctcccagagtcgtcaggaatcgacatgattgactcgtcccccagcgtcaacgggagggtaggtggcagcccccacgccgtccaagtgtgtgagtgagtgggcggctgtgcatgctgagtccaccccttttcactcgagtgtccaggaaaatccaggccctctctacggacttcagtgggagggatggtcagaaggtgcgatgtgtgtggtgtcccgttaggacacatctgctcagtgatacccgtgttagaattggttatgaaaaccatagaagcagggcaaacacacatgcatgcacccagacaccatgtgcacacggacacacatgcacacacgctcacatgcaaacacatgcactcacacacgcccagatactgtgtgcacacacacacatgcagacacacgcactcacacatgcccagacactgtgtgcacacacagacacacatgcacacatgcagacacacacactcacacatgcccagacaccgtgtgcacacacagacacacatgcacacacgctcacatgcagacacactctcacacactccctgacactgtgtgcacacatgctcacatgcagacacacacgtactctcacacacgcccagttaccgtgtgcacgcacagacacatgctcacacgcagacacacacatgcactctcacacacgccccaaatgccgtggctccagatctcagcatctctgggcagggctgaagtcccaggctgatgctgttcctgaatttccccgcacacagggcagcctcggggatcaggtcccagccggctgtggccctgagcacatcacttcaccttcctaaacgctgattctgcagctgcaggcgcaggataatagctccaacttcttaaggggtttcagggtgaatgtgacaatgtgagtcaacagcaggagcgccacaggtcacgcctagtctaacacacgctttggttaggagaacgtccccatcgcacaggcaccagggcagaggcacagccagggtccagggtgtttgtgaatgtctgtgttcgtggcaccgtgtgactcagtctcccttcctggacgctagcggtcacttgccatttctgagcgcacgtgaagcctctgtggtttctagaagtgtcggtgctgaacgcacgcccgtttagccttcctcacccgtcagtctcaattacaaaacagagtgcttgagaacgatggaaagctgtaattccatcccactgtataacccctcaccgcccacaagctgccttcgtggccgcggggaccccccccaccccgcttcttgttatctctctgcgcctgtttccctctatcttcagtggacgcaccgtgatttgggggttctgggaactgcttttttataggagcgcgaggagctgtttttccgggccctctgtctctgccacaccgtccaggtgaaagacgatgacagcgtagacggccccaggaaatcgccggacggggggaaatcctgtgtgtacatctcatcctcgcccgacgaggtggcgctggtcgaaggtgtccagaggtacgtcgcgggccaagggtctgcctgggtttcctgatgtgactcagcccctccccagccccagtcagggatttgcacctagaggcgtcctcagccccaccctgtgccctccacactgagctgtgctgcctttgcacccagcttctctggacccccgtccctgtatgagcccctcccaccgtgataagcagcgtctggtccccggcgcgtgagtcttcatctctgactttgcgtgggtggcttttcctcctgaggtctgcagtaagttagaggtcattccaaataaccacaggcttcaaaatacggaaacaatcattcttttaacacaaatctccctcctgcatctcagaaaactgaagcccagaggcccagcggccttcccagagccacagcctgggccggacagagcagagctggtgcgggacctctcaccgcccaccctttaagcaaacgcttggaaaaatactttaaacattccagatacatggcataatttcaactcaggggagccattttcaaatccatccagctcatgacttctgtattactgaacctcccctccccaaaagtgccttcagggactgagtatggtgagaatcatgttcgcgcttctcacctcattacagccatgtttttgtcgctgctaaactaatgtgttttctccatgcaacttgagtagcagcacagatacgtcaacagtatcaccggggcccttcgttccatgcgtaaacccacacatgcgtaggtgaggcttcttggagctgggtttctctcttcttgaaacacaagtgcccaggaatgccactgccttcatcacaggtgttagaagtcagggcaggctaccccgcccacctttgagactcctccctgccctgaagcttttcctccagccgctgctcccacctgggctggccagaggcctccactgccatccccctggtgccgcgaagcacgtctgtctcccgggtcctctgctggcctctcgcatcccaaagccatgctctgtctctgccgtcccagtggctcccacaaggccctgaaggtcgctgacccccaggcgtgcaggaggaggcattgtatagatgggtgcacccacgtgctggctgaaggcctgcgctggaccttcgttccccgtcagtgactcaagggccttggtgtgggggtaacagcctctcagggtccctctccctctggcatcgtgttctccgctcaacaacaacaaagtccacgaatcaatgagcaaaagtgtcatcgaagcaaggattgcaggccatgtgcctgccatgctcttctggagaacaatactgacaagaatgtgcctcactgctgtgtgccaaggagggttgggttgggtagaaattctcttgctcttggaagattttttgagatggtgaataagttcattatgataatttcctaactttataatgcagtttataatctctgtttaactgaaagtatttcttttttgaaaagaacgctttaccaaaatataaagcaaatactctatgaaagaggaacatcagaatctcagattcaccccgaggtttcccttctcattgcagacttggctttacctacctaaggctgaaggacaattacatggagatattaaacagggagaaccacatcgaaaggtatgtgcagacctcaccctcagatgtgaaaggactaacgaataaagagtgttctttataaggttctgcgtttgagggaaaagacaagttctctatgttctcccacaattcgcttcctctccttcccagtgacaccccaggaatgtcaccagaatgttctggagaagtgctggacacttagagaagggcttgggtgcagccacagcgctgcttcccctggatggtttttcttggagatgtaaattggagttcagtgaacaaaagttcactgtcaaatatgttttgggttaagccacctgaagtcaggttttgctgcaggccgcgttctgacctctccaggcccctttgcctccacgaggggagtgagcagctgcccccggtgtggccatgagtcccgcagggaggaaccctggctcacgtgctgggagcacagcgtcgtgtcgaaaacagtttgcacagttacgcttttcagtcaccagtttgatgttggattgttttacttttcatatctttaaaactcttcccattttttagggactgtctctgtcccaaattgcttgtccctgagataagtgacccatcttgagatctgactcaggagagggggtggtggcttatcaacaagcacgaatgtgcggtcatggttccggcaaagacacaagatctggtggtgatggcctcaaaacacgtggattttaaaatttcattcttagggaaaataaactccccagtggaagagaaaggacaaatcccttgattcggcggggctcctgggccctccgctggcaccagctgcaccctctccacagcaccctgggcttcccgggggccgcaactcactgccgttgaggctccgggtttgcagccgtggaggtagtgaggtcgtggcctagatgagagcccccatcagggctctgccaagggacccctggctctgagctgggctggcactgcggccagagcccctccgcagcttcccactgagtccaaggccctgaggaggctgaggggcagcagcgggggctgccaaacacttccgatgctccagacgccacacaggttttctgagtcttccggtaacaggacagcaccagccaaaacgctttttcctttggttttgatctcttagggtaacgccagttcattgacaaggatccaatctctgacacaactttgagtctctgttcagcggtgtttagggagggagtcggtgcgtagggaacgcagcctgcttggcagaatctgagcctatgccctgggtaggatggggacgtagtgaggagccggtgccacagggcccagactctgccccactgggtacacctgctgcgtccttcaaatccaggcctctcagggcatccatgggaggacacccctcacccagcagccctctgtgtgtcccctgaggaagggccagggctgccccagccattctgctgtggagagctccacagttaccagatggaatcacgtgagcacccgtgtggacggtgtgaccttctgcatttctctttcaggtttgaattgctggaaattttgagttttgactcagtcagaaggagaatgagtgtaattgtaaaatctgctacaggtaaaatttctttttcttttgatttattaagttatacgtggtggttgtgttttattctgatgactaaattctacaggagctttaaggatttagggtttaagaatgatttattctttttttaaaaactatagacaaatcctctcaaaatactaattttttatttttaaaaagtgcaacatttctggaatgctgaggaaggagtcctgggctaaacatccggcacccttgctctgtccatcttttagtgtcgagttggggccactttactgttgaaaattgcttaattccatttgtgaaagttcctctgcccatccctatcccccacccgcttttctccatgcagagctaaatgacataaaatgtttttaaataaccattttcaaggaaaaggtaatgtgggtttgcaaatgtatctataataatgttcaaagttgcaaagtgagctttgttgattggcagttgccgtaacagtgtgtctgtgagaacagcacactcggttcgtgctccggaatgctgggatgagcagtggcggggcacagtcagagccctgtggccgccatgatgttttggtgacccacacggttgggcactctcctgatcctcccactctgacctgtggctgcccctgtccctgacgattgcctctgcagtccaggtggatgcatctgtggtcccctgacctccctgcgaggagctctcccaggcactttgcatcccccaagcacaggtggacgacctcgtctccccccaccctcagcaggtcacgacacatgccacaggtcactcaacaccgcagcccctcaggctcccgcccacagtgctgaggcttgaacgtgcaggcgcccctggctgtttgccctggacaggcagggcccgtgggctccgtctgcagaggccacccctttgcatggccatcacttcctaagagctcccaccgccccctctgaggctctcactcaccttcatcaccaggttgtcctcaagtgtccccagagggcactgcccacagcccccacagtggccttgttccccgcttcctgccgtgggctttcccataggaagggcctttcacccatctgtcctttccacggacggctcaggaagcctctcccggacctcagccccatagcagcgtgcaggacattgctctatggtggagctgtctgtccgtctgcagccactggctgcctgcacgcatcccgaacgcagaaccgatgctcttctcagcaacacgctgacgtcacgccaccctccgccgagtgctcccaaatcctgtgccgttcagagccctccacgcagcgtcagagcagggcttcattaagagctgtgggatctcactcttcattgtttcctaaaaccagacactcccaggctgcatttagctctttggaaagatgcctggcaaacaaccaaacagccactccccggaaccagacaggctggagagcttcatgccagcattttcctaagatgtgccgagtttaattttaacacagtagacagagcagggccatcatcagtgccgtcgggcacccttcggatcaggaccatggtgcctcacttcctaagaccccgaaggagctgtagggggaggcagtgtgactctcggtgacgccctgtgagtcatagcggctctggggtgggcagcagcctcaggagggaggagggtgccatggctgctctggggggctgccgcctgccttcgctggttccttagacacagtcccactgtgtcacacagcatcacctctgagacacgccatcaaatgtgggatgaatccaggctccacagtgagatgtctactgatggtcataggatgaggaacaatctgtgtgtgaatgttgccaggactcccacgaagagcttttgccagccagaccgtgggatcagcaggacagggtctgagaacaggttcagatgcgcgagacttctgtgtgtcagaacccttccccccggctcggatgaggcgcagtcctgagagtctcagccactcggagttatctgggataaacgcatcctgggtgggaagttcctggtccatcccgtcacgtggttttccccgtagcagtcgaatctagctgttgagccatggctggaacatgctgcccgtgacctgcggggctgactcacgtggttttccccgtagcagtcgaatctagctgttgagccgtggctggaacatgctgcccgtgacctgcggggctgaccacggtgcccaagaaggcaagcatcagccaccccggagccgcccctgccgcgcactcaccccggagctggccctgccacacgctcacaaggggtttttgctgcatcctgaatgcccaagacctcagggcattgtgggctatgccgtggaatctttgtaaataacttctgttactatcaaaaggctgaagagccgctggatcactcgaagaatccgggttggaggcatttgtgccatgagaatatccctatccgcactgggacgcctgtggacctcctagggcctctccaaggaactgagagcttgcaggagagacggccctgccatctgaagccagccactcatcagttacttttaagagaagtttgaatatgtaattaagcaaggtgttctgtaagtagtagtcatccccggagaggttcactaattgcactggagttctccctgctgggcggggagaccctgcagccagctcacagctcgtgtttcctcctgggctcagccctgtagggggttgcggctgtcagagccggatctcactgttttggggctgagcagccccaacaggggcctcccatgatgtccgcaggacccttttttatatgtctgtacctcagtcatgtgtgctttcctgggattctccacggtggaattttgaggaaggacttcggaagtcacaggccactcggctgcatcaggccttccctttcaaaggcagatgtgaaatctctcttttgggggatcctgcggatgcttactgcacccaaggtattatgtacgcagtacacagaagaccgactcgaaagaagaaaaggagagtacataagcatattcatctatgaaaaagaaaagcaagcagaaaagatgaaagagaaggaaagtcctaacagtgcaccctcctggagctcctccaggagctgcttccttgatgccctttttccagccatttcggggacatttgctgtcacgcctggctttccatgtccttgagctggtctgtgagacacagtgaaagaccccccaccatgggctcaaactgtggttctatagccctttctcttctccaaatggcagtaagcccttcttggtcccagaggggacagccaccaaccacggctgcacctgcgacacaacccagctgtcttggggacaggatcctgtgtgttcggttatgtcacctgtgtgtgcacggtcttcagttgctcattgtagattaacttttgctctgtcctctgggtttttttattccaaggctgttcctcaccaagtcttcaggctgaaggtgtcctgtgtcttacagtggaattcacaagctgagacagtgggaaagttaagccattcacatgctcttggcatgagttgtgagccatgaaacatgaattttctagtaaaaaatgtgctgttgttcaagaatgcatcattatgtcatttggaccacagttctcattctgaactgtatctgatgaaacaacagcgttggctggaaaccatgggagtcgggaaacggctctgacatcgattgggtagtttaacccccgggccctgcttttctatgctaagcaactgagactctgtggtcacacctctgcagttctgcagagatcctccagggtccaactcccagcctcagcctgctcactcccgtgccctccagcctcagcctccccactctcccgtgccctccagcctcagcctccccactctcccatcccccccagcctcagcctccccactctcccgtgccgtccagcctcagcctccccactctcccgtgccctccagcctcagcctccccactctcccgtgccctccagcctcagcctccccactctcccgtgccctccagcctcagcctccccactctcccgtgccctccagactcagcctccccactctcccgtgccttccagcctcagcctccccattctctcatcccccctgcctcagcctccttactctcctgtcccctccagcctcagcctccccattctctcatccccccccagcctcagcctccctactctcctgtcccctccagcctcagcctccccactttctcatccccccccagcctcagcctccctactctcctgtcccctccagcctcagcctccgtcctcccccatgccctccagcctttgctcggcactggtttgctgcatgtattggcaacacctgtgtcaccaggtgccatcctctctggctgcaggttggcagccacctcagccacatgagcgtcaagtgtagccatgttcccacagcttccctgttggtgtctcaggagttagtgcttcctggcatccaggaaggaaggcaaggcggacccctgttcctactcctgagtcctcgtccaagctccaggccttggatccgggtcgtcagcccgagagcgtcccctccccatgtccctcccaccaccaccctggggaccactgcctgcccactctggggccctctggatttggtccccagtagacttcccgagggccctcagtgtctgggggtctcagggctctgccccgccaggagctgggcatggagcttcctacgcgtgccgctcaggctgctgtggtgtttctcccaccctgccgtcaccgcgccgtagcacggcgtttccctgcacccaggcacaaaccagccgcctggcagagtgccacgtggcttcgcggaccagggatgcttcaggtgcagagggagctctgtgtgtcgggagcacctgcgcccaggcacaaaccagccgcctggcagagtgccacgtggcttcgcggaccacggatgcttcaggtgcagagggggctctgtgtgtcgggagcacctgcgcccaggcacaaaccagccgcctggcagagtgccacgtggcttcgcggaccagggatgcttcaggtgtagagggggctctgtgtgtcgggagcacctgcgcccaggcacaaaccagccgcctggcagagtgccacgtggcttcgccgtccagggatgcttcaggtgcagagggggctctgtgtgtcgggagcacctgcgcccaggcacaaaccagccgcctggcagagtgccacgtggcttggtggaccagggatacttcaggtgcagagggggctctgtgtgtcgggagcacctgcgcccaggcacaaactagccacctggcagagtgccacgtggcttcgccgtccagggatgcttcaggtgcagagggggctctgtgtgtcaggagcaggtgacatcacagcagaactgtcgtggcctttgctgtatgctgcagtgcctggaagagaaactcgctttatctgaggcctgagaagcccacgttcacagcacaagtatgtccacagcgatcacagtgttactggacgtgtgggaaaaaatgacgcaaacgtttcccctgactcttccaagttcagaggtggcccggctgccttgctctgcatgaggacagatgactctccgaaggggatttgtgttcaccttccagcatttcagaaaccaggaccccctttgggtcaccccaacgcccgtcccgagggcattttgtcccctttcgtgtctttcccagagaaaaaacagagtcccggagccaagttcttttcctcgttcctgcctctcctgtggaatttctagggtgtaggaataaaacgaggctttggaggttatctgtgggtttattttttcctgactgtagcgtgttaactggtccattaaaatctttaaaaagctttccacactgctatccctgttttttgttttttaataatggcataattttaaaaaataatctagtcttccccatattgtgattaaactcctcatttttctcattttgtaggagaaatttatctgttttgcaaaggagcagattcttcgatattcccccgagtgatagaaggcaaagttgaccagatccgagccagagtggagcgtaacgcagtggtgagagccgggctggggagggcctcgtggcggtcagctcccctgctgtcaggaaggaattccatgttccacaagttcctggctgggaatggcgtattgtattccttggggaatgtttagaaatcagctgggccagaggcagacagacaggcagcctcagccggcaccgaccccagggggcctccgatacccagccaggcacaggctgtccagccaggcacaggccatctcctccccagccttgcacagggttttattttcgggtgggtgccaggttggttgattgatgttttggggagtcagaattagcacgtttgtggttattgtattggagcaaaaagtctttgtgttgacgtttctagtgatttgcttcaaaacaaatcagcactttcgttttctgttgtgacatcacctgtttgggtttctttccccatctgggtcttaagcttgtatgataaggtttctttccaccacttgttgtatagcaccgcccagcagcccgcacacctgagcctcccactccgtgggtccggctttctgtctttggggctgctgcggtagggggccggcctgagtgtctctcacagcagggcctcccctccccgtcagacgcgctaaagccgggcaacacgtggctggggtggacacgctccctcctgtcagacaccttaactccgggtgatgcgtggctgggtggacatgctccctcctgtgagaggtcctaacgccgagcgacgcatggttgggtggacgtgctctctcccgtcagatgtcctaacgccgagtgacgcacggctgagtgcacatgctccctcctgtgagatgccctaaagctacactgtgcgtggctggggtggacgcactccctcctgtcagacgtcctaaagctgggtgacgcatggccgggtgggcgcgttccctcccatcagatgccctaacgttgggtgatgcgtggctgggtggacgcgctccctctgctccccacgtggctgctttgtcccacggtgtctgcacccttctcccgacaccaccctggggtcttctccctcactccagcccagggcagcacctcctctcacaccgaccttatcatcttttcatgaaaaagaaacagtaactgacaggctctcctcccagaggtccaaaatgacgctggccagagtggctacgcactggaaaacaagacttccaaggctggctctgcaccaaggaaggctgaaccgagagaaccttggactagaggtcgtggtactcagcgctcccttcactgaccatttaaatgtaaagcaatgtttgtcctcgctgtcagtcgcaacacttgattactgtagatgtcagagcattaagaattcctgccgatggacaggagccctttcgctcgcgagcccgtgcgtgcagcagccagagcctgtgaacttcgtggaatgctgtcgacgtgcggatcatcatctttacgttgctattaaaacagctcctggcactacaaagtagctgcgttggagccaacaggaatccataaatcagcagcaggttaaagattgttgaacttctctgtgagggatctggaaaatacatcactgacttccaccagccacagagctgcagggtgggagccgagcgggttcctctgagcagcacaagcgtcctgcgcttcgacacacaatgagcctcagtacaggggcgtgtgggggctcctgagggggcagctccatctgcagctcgctttccaatagcgcgaggctgtgctttgctgtgacgtggtcgccgtgccatgctgagcacacgatggctacaggtcacaggtgactggtcctccatggagggtcttcatggcctgagtaccaaatatcttccacctgctggatccccactgctgctgcccaggagagtaggcgcatggattatgtgaattgtgatgattgtaaagtccacttgctgcttgtttcagaaagtcttcttgagatgtaattgccatacattgatctatacatatttaaaatgcgagagcagcaagggcattgacacacgaacacacaggtggaggctttgcctgctgggaaggggacgcatccctcaccctagagactgtctcgcgccctcatactcccatccctgccaactcccactcgctggagaccaccgctccactcgccgtcactgcagattcgtgcccaccttctggagcttcctatcagcagaatcacaaaaggcggctgttgtatccggcgtctttcactcccataactgctgagactcggccgtgtgggcccgttcatttctgtcgtgaggaacagcagcactcgttcagttgccgagcactagcggtactagttcagcggccgctagtccaagtacctctagcggtactagtccaagtgccgggcactagcagtactaaccagtccagttgccgggtgttagtggtactaaccagtccagttgccgggtgttagtggtactaaccagtccagttgccgggcactaacagtactaatcagtccagttgccgactgctagcggtactagtccagttactgggcactagccatactaaccagtccagttgccgggcactagcagtactagtccaagtgccaggtatcagtggtactaatcagtccagttgccagccgctagcagtactagtccagttaccgggcactagccatactaaccagtccagttactgggcactggtggtacagaccagtccagttgccagccactagcggtactagtactagtccaagtgccgggcagtagcagtactaaccagtccagttgccaggcgctagcagtactaaccagtccagtttccaggcactagtgatactaaccagtccagttgccgggcactagcagtactaaccaatccagttgccagcactagcggtactattcagtccagttgccaggcactagtggttctaaccagtccagttgccggcactatcggtactaaccagtccagttgccagcactagcggtactattcagtccagttgccagcactagcggtactattcagtccagttgccaggcactagtggttctaaccagtccagttgccagcactagcggtactattcagtccagttgccaggcactagtggttctaaccagtccagttgccggcactagcggtactaaccagtccagttgctggcactagcggtactaaccagtccagttgccaggcactagtggttctaaccagtccagttaccaggcactagcggtactaaccagtccagttgccagcactagcggtactattcagtccagttaccaggcactagcggtactaaccagtccagttgctggcactagcggtactaaccagtccagttaccaggcactagcggtactaaccagtccagttgccggcactagcggtactaaccagtccagtttccaggcactagtgatactaaccagtccagttgccggcactagcagtactaaccagtccagttgccggcactagcagcactcgttcatttgccgggcactcgcagtgctagttctttctacggatggaccagtttcttgattcttccgcctgttggcagacattgggttgtttccagttggggctgttttggaagcagctgctgcgggccgcctgctgtgcgtgtctggggctgagccgatgtgtccttttctcctggggaccctcctgtcagagcgtcttcatttctctttccacagcttcccttttctggctgcttttgaggtgtttcgtgatgggatgccttggtggagtgatgctgtgtttctttgctcagccgtgttgagcatctcggatctgcggcgtttcatcaagtttaacatttttcagcaattattctacagatatttttcttccttgctccctttcagcagttccaggacccatgtactcaactgccggatgttgtctcaccgcttacaaaggcttttccctttaaggttttccacgtttctttagagacggtttctgttgccatgtcacgagtttttcccgtgcagcgtctaacctgtcagcaccccacgcaggacacccctctcctcaaacatcggagttttcatgtctagaaattccgccagcgtggttttgtatcctcatgcccctacttaacatggggcgtgtgtgataacgattgcggtgactgtttaaatcctcctcgctaacggatgggacgtgtgtgataacggtggcagtgactgtttaaatcctcctcgctaactgcacccctgctgccagctctggaccagccacagtgttgcacagtcccctcgtttggggcagggacggtgcccctgcgtgatggtggcctgtggccggatgcctgcctgtgggctttgttggatgctgggtatcgtggtcctcctggagatcttaaatcttgttctggggtgtggctgagttcctgggaacagtctgttcctttcaggccatgccttcgtgatgtccagcagacccacagcagtgcctgccccgggtggtgctccccagactgccaggccctgagcgctgtgcctggtgagtggccatgcctcctggcagcaggctgtcccaccctcctcctaatggcttgttgctggcctccaggagcttcctcacagttgcaggtgcttgaggggccgtccacagcctctggcatccactccatcctaggaactctggtgcttgttcccttgacacccaggtctgccccataactcagggaattcactggctccggctacgttcccctgcccgagcctcggcctggaagctctccgggtagtgagctgggcacttgcagggccccctcggttggcagcattttattttgaaataattacagatttaggagaagttaaaataagtagaaagacagtccagaggggcctgtgtgtccttcgagtccagttaatttctcctttcgctggctgtgcttgctgtcatatcgaagaaactgctatgaaatccaagatgatgaagatttgccaccactgtgtttttttctataagttttctagttttagctcttaaatgtaggagtgtaatccatgtttggctaatttttgcatctttcataaagtgagggtcctactttatttccctgcatgcagttatccagttttcccagcaccatttggtgaagactctcctctcccactgagtgatactgacactcttgctgaaaagcatttgattacggtacctggaggtttatttctgggctctctgttccatcccattttctctatgtctgtctttatcccagttcccgctgttttgattactgtcagtttctagcaggctttgaaaccaggatatgtgagtctttcaactttgttcttctgttataaaatggtttggctattctgaacctcttgagatttaataggaattttaggatgggctttttcatttgtgcagaaaatgccactgggggccaggtacggtggctcatacttgtaattccagcactttgggaggctgaggcataaggatcacttgaggccagaagtttgagaccagcctgggaaacatagcaagaccctgcctctacaaaacatacaaaaggaaaatcagccaggggtggaggcacacatctgtggtcctagctactaggcaggatgagatggaagggtcgcttgagcacagaagtttaaagcagtagtgagccgtgatggcaccactgcatgtttccacgggcaactgagtaagaccctgtctcaaaaaaagaaacggaggaagggcgggagggaagagccattgggatgttgataggatttcatttaatcagtagatcactttgggtagtgttgtcatcttaacaatccatgaacatgggatatctttccatttatttaggtattttataatttctttcagcaaactttggtatttttcagccttgagtcttttacctccttggttaaatttattcataagtattttacttttgttgatgctactgaagtggaatttttttttaatttccttttcatattgttcattggtagtgtatagaaatgccactagttttcgtgtgttgactttgtaccctgtgtctttgctgaattcagttagtggggagcacattcttcatggtcttctggatataggatcatgtcatctgcaaataggccttagaaaggcatcctttctaatgtggaaactttctttttctctttatagcctaatcctctcacttagagcatctaatactctgttgaatagaagtggcaaaagcaggcatccctgtcttgttcctgatcctacggaaaagctttcagtccttcaccatggagggtgatgttagctgtaggtttttcttttcttttttttgagacagagttttgctcttgtcgcccaggctggagtgcaatggcacgatctcggctcactgcaacctctgcctcctgggttcaagccattctcttgcctcagcctcccgagtaactgggattataggcatgcaccaccacgcctggctaatttttgtatttttagtagagatggggtttcaccacgttggccagtctggtcttgaattcctgacctcaggtgatctgcccacctcagcctcccaaagtgctgggattacaggcgtgagccatcatgccttgctggttttttcacttaagtggtttttaccacgttgaggaggtttcttctctccccagtttattaagtggttttatcaccaaaaggtgctggttttttttcagatgccttttctgcatcagttgagatgatcatgtgggatttatgtcatgtattgcattgactttcatatgttgactcacttttgcattcctggaataaaccccacttggtcgtggtgtatgatcctctatgtgccattggattcagtttgctagtattttgttgagcatatttgcatctatatttctaagggatattgttctacagttttcttgtagggtatttgtctggctttgttttatgtgctgtgtccagggttttcgtagtacttagcaggaggaatagagaaaagtatttctgttctgtgttaccacaagagaaagtccctgattgacttttaaaagcagcgacatatttatttccaaaagcttctgcttatcactcacagcaacctaagttctgggaccattttgggttattatcctgtaaaaccattttcttgttatgtaatttttctggtttcagactgaagctatatatcttgtatgttttattgcctcttaggaaaagtcagagaattcattctgcaattcgcatttatgtctccaatctgtaacttgatcaacaggtgcacaaaagatctaatttcaaccacttatttattcagcaaacgttgttgagttttggctgtgtgccagggattcagtggtgaagtcagacacagtgcccacagccagagaacccagtgcctaacaatagaggcaaacccgtgagcagaaagctgcaaggtcgtgtgctcagcaggaggtgaggctggggtggctgagcagcgtctgttcagtgctactttcctctgagacgggtccactggcttctcacttattcttgaccaggagacaatatctggaggatgggaaggaaggagttccagaatgttcctggagaacaggactcaggcacacatagaccctgtcttgtgttctgacttcttcaactccccctttcccaacttctggcttttgagagctcaagggccatgacagccgttgacccagtggcaattctgtccacaccagttaagaggtcggaactagtgataaatatgagccttccctgagagttaggagacgcttcatctcatagaacggaaaacattgtttcaactcttacaaaccagcattctgccggattttaaaatggttatttgggaggattatggttcttttactattatcagtagggctggggctgaaggagcagggaaaacggaaggggaacaccctagatgatcaggtgtgaacctctgtgacggtcgcgctcagcagccttgactgatggaatgaagaggttcatctgtaaaccgccccctgtgtggctgcttcagcctctgcccccattccttgtgtcttgctggtggcggctgcattctctctgtatggtaacatccagaatgatgatcacagtaaggaatttgtgattcttgatttcttttgttcctgtgcaaccaatgattttgataaataacctggcaggtttccttcattgtgaaagaacaacctaccttacaaacttcccacataaaacatgtttactttagaaatatcacttgatattacccataaaattacaaatgattatccttaaaaaaaaaaggttaaatttaactctgcatttgtcaaaataaaggaacaaattttatcttttgatagatgactctgatttctgttacttatttccaggctttctagtctgaaaatgctgtaatccataatgattcttggtatttaatgtagacttaaataattcacttgttgatgacttactcctttcaagatttggttggattataatctttctttctttgtttacttagtactgtaagttttgaaagggttacaattcttgggttagttagtctaatgagagaagggatactgggaaggccgtggagcgtaatatttcagcaagtgacaccttgaattcgtgctaaacgctgcattgtgttctgcaggaggggctccgaactttgtgtgttgcttataaaaggctgatccaagaagaatatgaaggcatttgtaagctgctgcaggctgccaaagtggcccttcaagatcgagagaaaaagttagcagaagcctatgagcaaatagagaaagatcttactctgcttggtgctacagctgttgaggaccggtaaagtaaacgcatgcatcccgtcctgagagacaaactgggatgcaggccgacggcccagggcgtgtgagggcgagtggacgggagggaggccatccgcacagccgacggggcgtgtttgctgctcagggagaggctaggtgtcttgctacaccctggagtcatgtcaggaaggtcatgcctgggggatattttgttgtccatgaagaagatgcctgaaagcacactttcccaggaagtagtgaaaatagctttgtcatatcatattatgaacaggcaagatagaagggctcttacaaattctttcttctttttttttaagggatggcatcttggtgtgttgcccaggctggagtgcagtggcaccatcacaactcactgcagtctaaaactcctaggctcaagctgtcctcccttctcagcctcctgagtagctagaacttcaagcacataccaccatgcctggctaattttttatattttttgtagagataggatctcactatgttgcccaggctagtctcaaattcctggcctcaagcaatcctcccacctcagcctctgaaagtgctggaattgcaggcatgagcagtcatgcctgactgtaattactctttagaatggaatcaacaactaactctgttcctaaacttgttgctagttctttccaaatactggtattacttcttagatcattacatactcaatgtgtttatcattacttgaaaaaacttaatgaagtagaaaattacaaaaactaataatcatcataactggcaaaattaccaattacagattttcaggtacctctaaggcaagagctgccagtgtgccccagctccacaatggggactgaaagttgtttgaggctgaggccactaagaaacagtcgtctggtccacatggtgccttccgagctgagtgaaaggcatggatttcagtggtttgtaggaatggaagaaaaaaaatgccccaattgatgagaatgaagcagaaacttcagaaagttcactgggagtttatctcctagaagaggttaaaggcatcaagtttgaaagtctttaagatccatttcggtccaaaactgaaatccttatcactaaccctgcattttctgagcgtgttgaacaaatgttccttgagttctcgatctgaatggagtattaggcgaagtgggaagttttggtttggtggttttgtgttttgttttgaagtcactctcccctgttcagtccagagtaagtgcacagagcaccgtgtaaagaacgcgacttgcacgtgggaaggcttcagagcgcagggccacggccgccgaaaggctttgctgctgggggctgcgtccttgctctagtggccagtcactcacctgctgtctgtccaggagaagaggggtgtccgtaggatggtgtttgcctggggagcagctgggtcgatctttagaggccttggtggaggagcgtggggatgcctccggcagagcagatgggacagagcccctggggcggggggcaggttgacttgactggaatgggaatgtagaagagtggagagttaatgcctggttggcggggggggatctcagtggctttttcgtgatgatacttgcttataaattatttccttataatctccagtcagcaagtgcgaaacatctctgagcctcagcttccttttgaatcgaattgtagggccaggcccggtggagcacgcttgtaaacagggccaggcccggtggagcacgcttgtaatcctcgcaatttgggaggctgatgcaggaggattgattaaggccaggagtttgagcccagcctgggcaatatagtgagatcccatctcttgaatttttttttaattagtcaagcatggtagcaggcacctgttgtcctagctacttgggaggctgaggagggaggatcgcttgagcccaggagttggaggctgcggtgagctgagatcataccactgtaccctagcctgggcaacataaggcgttctctcgttctcttgctcgctctctttctctctctctatatatatatatatgcacacacacatatgtacatacacacacacacacatatatatatacacatacatacacacacataaaattacaggcttttttttcatctatagaatactatgattgtctgatcttgagacttttagctaggaagttcttcccaaaacctaaccagatccttccagttagaatttaaatccattcctttcatactttctagaagcatggcacgttacttcacacgaaagtagtctgaaacttagaaaaaatggaggccccaaagtgaggcagacatggtttgaccccagatctcccaaggagagggcagtggtctgactgctgtcggaagagccgcttacccccgacaccttctgcagcgtctgcaggctttgggttttccatatgtaaataggtgtggtgctagcgtccttactcgtgacatcatggtaagcatgaaagattgcacataggaagtgtcacacaggcctggcatgtggcaagcccatggcacctgttggccatagaatcactagtgttattctcagtattttatattatttagaggtacctggaccccaagtgggttctaagtgacaaacttagaacagtttatacaaaacaaaagacaatcaatattcctgaccaccttgagtccagatcccatctttccatggttgagacatttttggtggtggttataatttcctgaaaccctccccaggtagtgagtcccacctacacacaaaaccgccaggcttgtcagacgtcagtgacacaagacagccctttacttctcacatgtttgatccatgtttatctctctgctgttaggaagtgtttcgctgtgaaacactagttcagaccttcagaagctgcttcagtacttcgtggtgagatcatgagccacagtgtggagtgttttgattttgaggggctacgatattttgacagctttgcaagtttctgcagttccttatttggattcctgggtcagcactgacttttctctatgctgtgtttggttttgcctccctcaggctgcaggagaaagctgcagacaccatcgaggccctgcagaaggccgggatcaaagtctgggttctcacgggagacaagatggagacggccgcggccacgtgctacgcctgcaagctcttccgcaggaacacgcagctgctggagctgaccaccaagaggatcgaggagcagagcctgcacgacgtcctgttcgagctgagcaagacggtcctgcgccacagcgggagcctgaccagagacaacctgtccgggtaggcagcgcgtccccgcccccacccccacactcccgcaaaaggggcttcagacccagtggccttcacctgcaagtcggggagccgcattgtctctactgggaattcggttctcccctggggcattaatgccagcttcttaggggtcaggtgaacactgggaacaaaacgggctgttttttccagcaattgtgatgtgtctttttcacatatgtgtgtgtatgtgtgtatgttcagtttcacactgccggctaacagatgcaaaaagacatgatggataaaatattttgagtgggataattctcatctgtttctgagacttaggggctctgcttcaggcaccttcaagcatctgctggaggaagtggagatattaataatgcatggttgttcgtctaagacgaagcagtacatgcccaagagttgtttttttcccaagaatattcagtagtttattcagatacattttatcgatgctgtccttactggtgttagatgcattatctgagattacatgttatttgaatcatttcagtttcattcatgtacataaagcgaaagcagctctctaatttacacaaatgttaagttattcataaatagcacagataattccctctacctgatctgcaatctgcagaactccttttagggattggagggttttttttgttgttttttgttttttgtttttgagatggagcctcaatctgtcgcccaggctggagtgcagtgatcttggctcactgtgacctccgcctcccaggttcaaacaattctcctgcctcagcttcccaagtagctgggattaaaagcgctcaccttttaatagagacagggtttcaccatgttggccaggctggttttgaactcctgacctcaggtgatccacccgccttggcctcccaaagtgctgggattacaggtgtgagccaccgcatccagccttcttgtcattttgaaacccagcaaagaggagattatgaccatgttctttccaacttaggtcatccaggcagaaacccaaggacttagctgtaaagactgtgaccaagaaggttgagagtaaagaccaaccaagatcttagaccacaagatgaacgccttcctgttgtttcaaaagtacagggacttaacgagtccacaaagagagtctgcacttgctttacctaaaataggaatgtttcataaaatacactcttaaatgtcgacaaaaggtgttatgttcaatactataaaaattgtattggtaaaacaagaaacactagtttcttaatcccatggatttgtagcatctgtcgatatccaaaaacaatacagtcttctaaaatctatagatttagtgattgagcaatctttctgactcacgtactctaacagactttcagcagatatgcaggactacggtttaattatcgacggagctgcactgtctctgataatgaagcctcgagaagacgggagttccggcaactacagggagctcttcctggaaatctgccggagctgcagcgcggtgctctgctgccgcatggcgcccttgcagaaggctcaggtgctgcccgcccgtcctcgatagctggtggtcagggcgtccaaaacactgaaaaccttccgttaggtctcaccgcctcagattgttaaacaatctagcagggtaccacctgttaaaaatagaagcaaccgtgatagagatttaaaacgcagatcttgttttgcttgtcgggccagcttctgtgattagtgggtgatgaccagtcagatgtatgacccttccagatgcagtggccaggacagctgccctggctgacttctgttaaaaaaaaaaaaaaaagctatctcaatcactcctgagaatctacactaaaggtgtaagggaagggagctgacattactgagcacctagtgtgtgcctcctacagatacgaatgcatttagtctcaaaataaccctctcagacaaatgagggcaccagctttacaaatgggaataatttgccgaaaaggctgcagatgggaaatgccacgaggattcaacttgtcttgtccatcaaactccaaacgtctcacgcggccatgttcttgtgggaaacgcacacctgaagttttttctttaaatagttttgaaagcactatggaatgtattgtaaacatggatgtctttctggtatcaggaagcctagaaaagttctgactttgttataccacattttagatatgataggccaatttctcttgaactgttcatgaataaatccatcattggtcagagcaaaccagtggttaaggtaaaatgcgtctcacacaaactctggaaaccaaggaggtgaaaagttgagcctttgtgcatgtgggtgcactaatctgtcaatttcactaaaaacacagaaccagggtcctcagaatgacgagcctagagcattcacagaccttccatgtgaggaagacggtttgatgtcctcctctccctcacatgcgtaactgcacataaaccttacagaattacttcccaaatggaacagcaactaaggatttgccattcgctcttcatgtattccatagtacttttttaagttctcaactggcttttgaaacatttcatacaaattaacttgtgtttcagtttcctatcttgaaacaagaaggcacccacgtttccccccatctcttcattcttacagcttgaactgttacatttaggcacatagatgggggggaaaagattataaagaaattgactaaaaacttggaaattatttttacataaaattgtcatatttgattttgcacgttacaaatttgaaaattaaaatagcattaggaatagtttatgtttagaaatagatgctttataccaaatagcttgaagtaccttggaatagtgatcttacagaatgcagggttcacatttgcccctgtatatttaaatatattttcccaggatttacacacttttccatatatttaagtagaggaatataacaataactacaagctacttcatatatctcacatctctactgccaaagtttgtctaccagccttttccagctcacgtcattttaatcatacctcatttcttttactttattttgttttgctttcaatatgaaaaaggttttatcctatatggagaaaacagacagaatgtcgtaaattacctctaagtagttaatttttttatttgcctaggctaacttttcatctttgttatttctgcctagtgaatgaataacctgttcagaagtgaaacagagaagataaattccgcatttctttcttttgcagattgttaaattaatcaaattttcaaaagagcacccaatcacgttagcaattggcgatggtgcaaatgatgtcagcatgattctggaagcgcacgtgggcataggtgagcttcgtccttgctgctggcacatcctggtggccaggtcaccccttcgctagacaaaggcccatggcagcacgcaggtgcattcaggacacccccgtcaccaccctcgtgtgtgaccgggaaggctcatgatgatggtttcatccgttcttctccccgtccctgccctgtgtgtggtgtgcagaaagcatttcttcagctccttcacctccgtcttctaggtgtcatcggcaaggaaggccgccaggctgccaggaacagcgactatgcaatcccaaagtttaagcatttgaagaagatgctgcttgttcacgggcatttttattacattaggatctctgagctcgtgcagtacttcttctataaggtaggagggtcgccgctccccctcacggtgttagcaacaggtcacgcacagggtggcacgacccttgtctgagccacttgatgccacaagaggtcattgatctccgaggagcagcaactgtcagaaaggaaggggtgaatctgattgcagtcatctcttgcttagctgtgactttgctttttacagtttccattacctacagtcaacccatgcccaaaaatatcaaacgcaaaattgcagaaataaacagttcctcaggtttaaattgcatgccattccgagcagcgtgatgaagtctcacgccgtcctgctgtctccttcctgggatgtggcttgtccctttgtccggtgtgccgatgctgtgtgtacactacctgcccctcagtcactctgtagctgtcttggtgatgaggttgacagatcacaagaagaagggtgaatatgacacaataatatattttaagaggaggagggagagaccaaattcatgtaactttgattacggtatattattatagttattctatgttttgttgttactctttcactgcacctactttataaattaaactttatcatgggtgtgtatgtatacgaacacacatacccatctagagcatagacagggttcaggaccatccgcagactctgcatccccccagggtctgggaatgtacccctgaggatgaggagggcctgccgtgccgcgggaggagacccccagcccttttctccccccacagaattgagtgtggaaccagtgagaacctttcaggtggaaatgtttgaggaaggattccttattcactgtgcagttcgattctttcccgtttatactgatacctgcattgccttcttgtttctcttggagctgacaaatttcctctatacgttgtctgtcctgagtggccaaaacgtggtcacatgtgcatttcagttgcccctgaaataagagaaagctttctagaacccattagtgctgttctgccgcacgctgggtgcacgtggatccctcctcccatgtggggtgggccacgtcggtaggtggcggctgcctccctctgtcccgtcaccgaactaacagttatgccttgcctttcagaacgtctgcttcatcttccctcagtttttataccagttcttctgtgggttttcacaacaggtcagtcctagggtcttcagggacaggctgtctgagccttcttttccttcccgcagtgggtggctgctgtggggaggggagacttgggaatgagcagcactccccggcaccacgagggagccagggtgcccagcagcaggcgggggtgaagggtcgggcctggggaggggggccacggagctgaggagttgccgtcctggaggccccttgttccatgtcttctgaaactgccgtggccctgagatgcgggccagtgatgatgtggtctcctcagggcccagcagtgctgggctgggcatcctgatgccactgcaagaattaactccaactcgaggtccttgtggacatgggccaccccggtgcctggcacgttaacacatgcaacgtgcccataggggaagaagacagttcccatccgggaggggtgaaggactccccgggcatctgccctagatggacacctccttctgtcacatgtgtgctcagtggttggcgggccagctgccttcatgggaagtgactgcgaccagagtcactgaagcttgaagatggcaatcagaattgcaaatgttttctgtgacttttttccttttttttttttttcttgaagtttgtgctgatagaatgggatgagtcagtgttaggctttttgccagctgtgactttcatcctgaaatcacagttgatatcacagaccctagtttatattgttaagctttgaaaagcgctctggtctttctatgcatttcagaaagaaaatatatttaatcaaaagatccaaaaagtttgtaacaatgcactgaggtgccacttcttgtgactttcctcttacagactttgtacgacaccgcgtatctgaccctctacaacatcagcttcacctccctccccatcctcctgtacagcctcatggagcagcatgttggcattgacgtgctcaagagagacccgaccctgtacaggtaccatcctccaaacagcctctcctgagagcagagagagtaactaggcagcactctggcagttccttccaatagccacctggcagacctcagttgagggccagaagcattcggcatctgctgatattcttgcttgatcaggagcttgtttaaactggaagcaacatagctcaaatggagattcttcaagtcttgctggatggtttatgctgcatttggaacatctgtgtggagccagtttgcactttcctgtgctttctgacagtcctgagggagctggggtacaagcgtcttcctcgttgtgaccctagggaatctgtggcctaagttatcctttaaaaccatgtgtgttccattcagtgagaaaaaacaaaaattaacagctctggtttcagggtgtcttttctccccgttattttttaaaaataatatggaagagatatttttctgctatttcagaaatgccccccaaggtctctggcagattcaatatgttactgttttccatggtcttttaaattgtattagtccattttcatcctgctgtgaagacatacctgagactgggtaatttatgaaggaaggaggtttaatggactcacagttccacatggctggggaggcctcacaatcatggcggaaggcatgaggagcaaaggcacgtcttacatggtggcagacaggagagcgtgtgcaggagaactttcctttataaaaccatcagatatcgtgagacttagtcactattacgagaacaacatgggaaaaaaccacccccatgactcaatcactgcccaccaggtccctcccatgatgcgtggggatcataggtgctacaattcaagacgagatttgggtgaggacacagccaaaccctatcataaattaaaattttatttttcagataattttacatccatatgcagttgtaagaaataatagattctgtgggccctgatcccatgtcccttagtggtgacacgcaagaaactgcagtccagcatcacatccagtgtactgatgttggtgccgttcacccgttcccttattcagatcacccagctttccctgcacttacgtacatgtgtgtacatgacacgtgtatgtgtgtgttcaattctgtgcagtcttctcacatgcgtgtttcctgcatccaccaccatagccaagaccactcacttccctgcctgggattctgcaggaatccgtgcatcggcctcactgccctcatcagaatatttagccattctgtgggatcttgacggcttggatccaaaagtaatcactgtaggtgattaaggacgatgataaaaaggcaaacttctgagttggttgtacatctttaataaatctaaagaaaatgggaataaatctaagaaaatgggagaagatatactgttctagacatgtgtctgaaaggaatcctgcaaattctgtcttattgaacaggcatctttaataaatctaaagaaaatgggaataaatctaagaaaatgggagaagatatactgttctagacatgtgtctgaaaggaatcctgcaaattctgtcttattgaacaggcataaggtgtcacgtcaggcgtaaggtgtcacagcaggcgtaaggcgtcacgtcaggcgtaaggtgtcacagcaggcgtaaggcatcacgtcaggcgtaaggcgtcacgtcaggcgtaaggtgtcacaagctcggtgaacgtcaggggtgtgccttgtgttctctgttcgttgctttcagaagcagcagcatgtggcagcatctctgtgcctatgacgatattgcagtgaatatgagagagaaaatatctgagcaaaagttagccaaggacatgagtgggtagtgaaatgctggttgtgatgaacatgccacatttgtggccagagcacaaacttgatgtttactggccgtgcacatcttatcccatgaagacaacgtccagggatggccaccccagagcctgggggaggtgccgggccctgattctcgaggacacacgctgtgcacctttctcctcaccagggacgtcgccaagaatgccctgctgcgctggcgcgtgttcatctactggacgctcctgggactgtttgacgcactggtgttcttctttggtgcttatttcgtgtttgaaaatacaactgtgacaagcaacgggcaggtcagtacagagctcgattgcgctgacttagctgcttaggaataaagcctcccaagcccatatgatgattttgccaaagcagaattcagtgcagcccatgcagcttcccagcggggtccatcaccacctgcgcagtaattcagtgcaggccacgcagcttcccagcggggtccatcaccacatgtgccgtaattcagtgcagcccgtgcagcttcccagcagggtccatcaccacctgcgcagtaattcagtgcagcccatgcagtttcccagcggggtccatcaccacgtgcacagtaattcagtgcagcccatgcagcttcccagcggggtccatcaccacctgcgcagtaattcagtgcaggccacgcagcttcccagcgggatccatcaccacgtgcacagtaattgagtgcagcccatgcagcttcccagcggggtccatcaccacctgtgcagtagttcagtgcggcccatgcagcttcccagcagggtccatcaccacctgcacagtaattcagcgtagcacatgcagtttcccagcggggtccatcaccacctgcacagtaattcagtgcagcccatgcagcttcccagcggggtccatcaccacctgcacagtaattcagtgcagcccatgcagcttcccagcggggtccatcaccacctgcgcagtaattcagtgcaaaccatgcagcttcccagcggggtccatcaccacctgcgcagtaattcagtgcagcccatgcagcttcccagcggggtccatcaccacctgcgcagtaattcagtgcggcccatgcagcttcccagcggggtccatcaccacctgcgcagtaattcagtgcaggccctgcagcttcccagcggggtccatcaccacctgcgcagtaattcagtgcagcccatgcagcttcccagcggggtccatcaccacgtgcgcaataattcagcatagcacgtgcagcttcccagcgggatccatcaccacatgggcagtaattcagtgcggcccatgcagcttctcagcggggtccatcaccacctgcacagtaattcagtgcagcccatgcagcttcccagcgggatccatcaccacctgcgcagtaattcagtgcaggcctgcgcagcttcccagcggggtccatcaccacctgcgcagtaattcagtgcagcccatgcagcttctcagcagggtccatcaccacctgcacagtaattcagtgcaggccatgcagcttctcagcggggtccatcaccacctgcgcagtaattcagtgcggcccatgcagcttcccagcggggtccatcaccacctgcgcagtaattcagtgcagcacgtgcagcttcccagcggggtccatcaccacctgcgcagtaattcagtgcggcccatgcagcttcccagcggggtccatcaccacgtgcacagtaattcagtgcagcacgtgcagcttctcagcagggtccatcaccacctgcacagtaattcagtgcaggccatgcagcttctcagcggggtccatcaccacctgcgcagtaattcagtgcagcacgtgcagcttcccagcggggtccatcaccacctgcgcagtaattcagtgcagcacgtgcagcttcccagcggggtccatcaccacatgggcagtaattcagtgcggcccatgcagcttcccagcggggtccatcaccacctgcgcagtaattcagtgcggcccatgcagcttcccagcggggtccatcaccacatgggcagtaattcagtgcaggccatgcagcttcccagcggggatcatcaccacgtgcgccataattcagcgtagcgcgtgcagcttcccagcgggatccatcaccacatgggcagtaattcagtgcagcccatgcagcttcccagcggggtccatcaccacatgcacagtaattcagtgcagcccgtgcagcttcccagcggggtccatcaccacctgcgcagtaattcagtgcggcccatgcagcttcccagcggggtccatcaccacctgcacagtaattcagtgcggcccatacagcttcccagcggggtccatcaccacatgggcagtaattcagtgcggcccatgcagcttcccagcggggtccatcaccacctgcgcagtaattcagtgcagcacgtgcagcttcccagcggggtccatcaccacctgcacagtaattcagtgcggcccatgcagcttctcagcggggtccatcaccacctgcgcagtaattcagtgcagcccatgcagcttcccagcgggatccatcaccacctgcgcagtaattcagtgcaggcctgcgcagcttcccagcggggtccatcaccacctgcgcagtaattcagtgcggcccatgcagcttctcagcagggtccatcaccacctgcacagtaattcagtgcagcccgcgcagcttcccagtggggaccatcaccacgtgcgcaataattcagcgtagcacgtgcagcttcccagcgggatccatcaccacatgggcagtaattcagtgcagcccatgcagcttcccagcggggtccatcaccacctgcgcagtaattcagtgcaggcccgcgcagcttcccagcggggtccatcaccacctgcgcagtaattcagtgcagcacgtgcagcttcccagcgggatccatcaccacatgggcagtaattcagtgcggcccatgcagcttcccagcggggtccatcaccacctgcgcagtaattcagtgcagcccgtgcagcttcccagcggggtccatcaccacatgtgcagtaattcagtgcaggccatgcagcttctcagcggggtccatcaccacatgtgcagtaattcagtgcaggccatgcagcttctcagcggggtccatcaccacatgtgcatagctctgggtcactttaaagatcgcattacctgagtgctcagtgttgctgtaaggaaatgtcctgctgaagtttttttttgtttttttgttgttgttgttgagacggagtctcgctctgttgcccaggttggagtgcaatggcgcagtcttggctcactgcaagctccacctcctgggttcacgccattctcctgcctcagcttcccaagtagctgggactacaggcgcccgccaccacgcctggctgactttttgaatttttagtagagacggggttttaccgtgttagccaggatggtctccatctcctgacctcaggtgatctgcccgccttggcctcccgaagtgctgggattacaggcgtgagccaccatgcacggccagcctgctgaggttttcagactttatctctgtaactaacagttcaccatcagtttgttacctagtggtaccattataccatttagacattgcatttttgatgtgggaatgaattccacgttgagcccgtgttagatttccccgagtaccatacttagtcgtcttcctctgtgatgagtagatttgtagttttctagcagacattcactctctggttgtttgcctaacccctgggggtttgttttatttgtatcttgcttttttctttttgccactggcgtcccttcccaccctcagataatgactaccaacacacatatggtaagacaatcatgggtttgtcgtttctctgtgtttttggagtgcattacaaatgaaatatttctcgaaaatattttcaaacgtgaattcctgtgtgctttgtcggtagaaacgctgttagccgctgctgccccacacaccccagagctagctctgtgttagaagggtgtgtgcgcctcctgacgcacatccttgctgtgttccctcggttgccatgtcagggtggcccattgagccagggatgttttccgaattgactggattcatgggagcttccctcgattttaaattaaaggcagcacaggcatgtgtgggaggcccggtggggccctgtgcttcctgagagagccacaccaggcattcggtagatgtcagagaccatccctgcttaaatgcctcaggtatttaactagccgtacaagcagacaccagcgctgacctcggagaaagtccctcttcagcagccccttctgggtgacttctaaacagaaatcggcttcgttccttgtttagcctgacctctctctccctgtgtgtttgtccctcagactgctgggttcaaacacaaaagtcctgctatgtgtcctgtgcaccatttacctgctttagtcgttttcattcctctttactaaacactgctgttatccttcgtcatcacttaaatcagtttttaccaggtctatcttgagaaccaattcaaatattatttcactgttttaaaagctttaagttttctagaacttattctttgtcttcatttattttaattgaataattcctgaatgccaccaggccatgaacgtcatcaaacagagctacctgttgattcttttgtatcttttatgagattttcttccgagttgggcttacgtaagcatctcgcgtagcccttaagagagaactaagaggtagtgtcctgagcactgagattccaggctcctggcggctgccaatggcaatagcaagtcccctttttcccacacttgattttccagttttctctcacaaacaccaccctggttcactacaaccaccctatcagctggacgttcagatcatgtgaaagctgaggaaagagaagttcggacagactagacaccctgtgcggtgtcagctcccgagaggcagggcctgggtcatacccggacgtccggctccagacttcatggtgttgcccagtgcggcctctgggttgctctagttccaaatttcagcgtgaatgtgaacgtgcctcccaagagcccccggagatggacttcaggggcaaggacacgggcgccactgtcctaggagggcagcccggctgtgctcctgaatgaggtgctggcaacgcagtgccaggggcttctctcagccttcctggcagggtctctgcagcgtctccgccttctcggatccctggacccctggcgtgtccgcagtcagctgcacctggtggtcagtgggcactgtggctctgctgccttcctgggatccgaggatttctactagctcctgtttcctggtctcttccggctgtaccctccagcccctggctatgtcctggaaggtaccttgagcccccacggaacccgcgtgcagccccggggtgatgccagcactcagggaacttgggggcagtcctagtggctgacagccctcttggtccttacgtagcaatttggggttggggtgctcacccctgagaatctcccttccaaccaggatactcccaacggggttacagttcagaggccctctgggattgattgttcttgggtgagagctactttgttttaaagacctaaattattctataggaatatctatagatcctgtgtaggattggaggaacaatagaattatggacatctctttcaaaagttcaccaatggagcattttctgcactgacatcgtaagccatagtaacttctcattttgatgccacaaatgagaatgcgaagacaacagttatttgttgaacagcaagacattcctaagtgaacggttaaaagctcggaacgtgctttgatagacgtaggatgcgatgagagcagctgaaacacgagcggtccgcgtatgggccaggtgggaggcagagggatctgcacagggaggggaggcagtggatgccactcatgaccgtgaccttgagaaggcgcaagttatgctggccgtggatgtttttatacatcagagttaaatgggtctggtctgaggactttttgagcagaaagcttctataggaatacccattctcaaaggagggaggaagtgggggcatggggcttagcctgcagtggtggagggtggccagccccagaggcagatctgctgaaggagtgaggctttcgcactggtcaggttcttggctgagatgtgcctgtcacatgaggacagggttccacagaaatcagaaacaggagcttcactggggatggcgttgatgtcacttggaagaaaagggtccctgtgaaaagccctttgaaaaaggagattggtatcccagggatgcctgccacccccagaatctgatggaaataacgaccagcaattgtagtaataaactatccgcacatgttagtccattttcacatggctctgaagagctacctgagacagggtgatttaggaagaaaagaggtttaatcgagccacagttctgcaggctgcataggaagcatcgctggggaggcctcaggaaacttacaatcatggcggaaggcaaaggggaagcaaggcccttctttacaaggctgcaggagagagagagcaaaggggaaaatgctacacactttgaaacaaccagatctcatgagaactcactcgcccaccgtcaacgagatctgcaaggaggacgtccatgattcagtcacctcccaccaggctctccctccaacacacggggattataatttgagatgagatttgggtgaggacacaaagccaaaccacatcatggcagttcacctgggggccccacttcaggccaccaagggaataagagggctttccagagatgcgtttcaggatagctccacagtggactagcttccaaaggacgtggacacaggttagtaatgggtcagcgtttctcaggggccctgaccaaggtgcctgattctggattcacgatagctgtgctttgttcctcacctataaagcttacagctgtggcccatgtgctctgcaggaccaggcatcctgaggcctaactccttatcccagttctgccattaccccctaaacccagggagccccagctgggagcttagaaaggcagtttctcggctcacagcagggagaggggacagtgaggaggccgtgtgagttgactgcagttatcacctgtggcgctgttggtgacacacactgcttcacagggcacccttgagttcatgtcttgctgccatctaactctttcagagttctgtgttgggatggccaaggtgaggcctgggggaggaagaggagagctgggcagcgtcaggggcttttcctccaggcccagctgatgtggttgtctgggtgcaaagccgccctcagctgctgtggaggcaccacttggctgaaagcatcagcttccagttacagcacagcagcctcccgccctccagcaccttgctggccacatgtgcttgtaggctgctgccaagccacagctgttcctagaggcatgatattttcctgccccagaagttaagccacaaagagacggcactttttggtgagtgtgaaacaggcttctcacccgggctctgctgacattggggccagatgtacatcctcgtgggccactgtcgtgtgcactcagcagcccctccacccccccatccaaagctagcagaccccacgccccagaaatgtctccaccacggccaggtgtccctgggggcaaggctgccccagccgagaaccacaagcatgtgtagatctgagtgacactgtaggccaggcatttccaagccagaaggaggaggcccacttctgatcacaatgaggaagtgagggaaaaactgaaggatgtgttgatgggggcccctaagaagcggtgttcactacaaaaggtcctaacacttttttctataatctacaaatgagatgttatcctgttatcccactgaccatgtgggaggactgtagcccacaccctccctcagctaaatcaaggggtatggtgatgggtgtgttgttttggttgaaactgaattctgaagaacagccatttgtattccagctttttaagagacagagtctgtgctctgtcgcccacgttggagtgtagtggcgtgatctctgctcactgcaacctccgcctcccgggctcaagcaattctcctgcctcagcctccctagtggctgagattacaggcaggcgccgctacgcccggctaatgtttgtattcttagtagagacggggtttcaccatgttggccaggctggtctcaaactcttgacctcatgatccgcccacctcggcctcccaaagcgctgggattacaggcatgagccaccacacccggcccgctttttaattctttataaaataaaattccctgcgaggtgcagttcatggaatccgataaactagaaatcgtctgggccacagcgcaggagcgtcccaaaggaaagcaggttctcccgaaacaagtttccagtcgggggttttccccaaggcggggggtggtctgggcagcagccctttctggcctgtgcctcgtgcggtagagaggcgtgctgtcctcacgggtcgggcacgcggtcctcacgggtgtgtctgtgtctgtgctgcgttgccagctggcagctcgtgggtcccactgaccttccctcctccacggccacctgggcaccactgctggcggatctgtggttctggccgcacgcggggcagcctctgtccagccctgtcctgtctgccggcttgtcttctctgtcctgagggaggttccccgagggaagcccccaggcttccccctctgcatgggtgcctggggtgtttcctctgcatttactcgcagaacgttcccgccgctgttcttcaacagcaggcaggagtctgagctgagttcagaagggaacagacacagtctgtgagtttgttcctgaaacccgtggaatgtagctgggtactcaggcaactgtcttttctacgtaaaacacaaaacagaaaaaggaggtttgcgtgtacccgagtttgcattatggatatttaaatgccagctgtgagggagtttttgtgctcagtttgagaccttgggacgtctgttgtggctgagagcattgagcagggccagcgtcaggagcgggcagcaagttgcagataggcaggctctgagcccatcaccaagccacagaactggtggtgggagatgcagccgggaaatgggggcgtcctgccgtgctctggggagttgctgcatcttcttttacgggataataagaaaatatagtgcttatatctttggggtttgaagtgttggcacacaagaaaaatgaggtgtattttctaaaactcttgattgtgaaagagaaaaaaaaatacataaaaacgagatgacttggactattttccccaaacagatatttggaaactggacgtttggaacgctggtattcaccgtgatggtgttcacagttacactaaaggtaagtggtctcgcgctcacgttcctcccccagccacagtgaacccctgcagtgtaggcctcacgcgctctgagctctctgaattataactctgtactgaggctggaagccactctccacccagccttggctggctcctggggcacccctgggcatccttgtcctgctgtttagacaagtaatgcacagccactcagcacacccggccaccccatgtgcaaaccccagagctacaccggaggtaacctcgggagcaagctgcttctttgtgaaagaattcaggctagaattgttttcagtggcaagtagccctccccccagcgccatcaaaatacactttaattgaaacaaattaatgtattttgaaaaatttcactctttaaagttcagtgaaattatatacagaatatatcattatgaaatctcaaaacctatcagactgagtcttaaaaagtgataccaaaacattcctaaggtgattttcttagatagtgatgtaaacaacacctgactctaaagtaactttctggccaggcatagtggctcacacctgtagttccaacactttgggaggccaaggtggatggatcacctgaggtcagcagttcgagaccagcctggccaacatggcaaaaccccatctttactaaaaacacaaaaagtagccgggcatggtggcacgcgcctgtaatcccagctacttgggaggctgaggcacgagaatcgcttgaacccgggaggtggaggttgcagtgagccaagatcgcaccactgcactccagcctgggcgacagagcgagactgtctcaaaaaaattttaagaagtaactttcttcagtagagacataaagaacaccttaatctgaatgactttcttcggtgacgatataaacaacaccttggtctgtggcccgcatgctgccatctgggaaatacatccatggctcccttacctaggacccagggctgtggcgtccccacattcttcctctccactcacactgtgaggtgtggctttgtcttcctgagcagtgtgaggtgtggctttgtcttcctgagcagtgtgagctgtggctttgtctcccgaacggtgtgaggtgtggctttgtcttcctgagcggtgtgaggtgtggctttgtcttcctgagcggtgtgaggtgtggctttgtcttcctgagcggtgtgaggtgtggctttgtcttcctgagcggtgtgaggtgtggctttgtcttctggagcggtgtgaggtgtggctttgtcttcctgagtggtgtgaggtgtggctttgtctccttaatggtgtgaggtgtggctttgtcttcctgaacggtgtgaggtgtggctttgtcttcctgagtggtgtgaggtgtggctttgtcttcctgagcggtgtgaggtgtggctttgtcttcctgagtggtgtgaggtgtggctttgtctccttaatggtgtgaggtgtggctttgtcttcctgagcggtgtgaggtgtggctttgtcttcctgaacagtgtgaggtgtggctttgtcttcctgagcggtgtgaggtgtggctttgtcttcctgagcggtgtgaggtgtggctttgtcttcctgagcggtgtgaggtgtggctttgtcttcctgagccgtgttttgcaggcattgagtcgtcattgctgggtcttgcgtttggtttagtttctcgtcaccccccggctctctgtcctgcccatcacgatcattctcactgctcagatgacaccgttaactgcccttttttttttccttttagcttgcattggacacacactactggacttggatcaaccattttgtcatctgggggtcgctgctgttctacgttgtcttttcgcttctctggggaggagtgatctggtaaatatctgataagtagctgataatctgataaatatcatgtggttgttatttttttatcaagggttgaagacacattttccgtgcggccctgttggttggggcaagtgtttgttgaatggctgctgtgtgctgggtgtcgtggggtcctgggatacagtcgggggcaagacaccggggggttcctgctccggtgacttgcatcttccgggggagaaagacgctaactgataacagcttgtgacgagttatacggaggaacagaccaggattccgcaccaggggacccatgtcagattgaaaggccagaggtgacttttcagaaacagtcatttgaaacctggaagaagagcgccatcatcacagcaagtcccagctggtaaccgcctcccacaacgaggcactggccaggcattcgacaggtcctgtctcactccatcctcacgccccgcagcaagatggggcccaggcatggtggggctggaccttgcccgcagcagcctgactcatcggggagcctctggtttgggggagagcagcaggcacgcaggcccgggcgggaggaggtcctccgtgagtgggagccgtggccagcggagaggggcccggaccaggctgcagagcaggcatggtggcctcctggaccgccggccgtgaggatcctggctcgaggctgtcgtggtcagtcgaggcagagcacagcagagttgagtggctcttttaaaaaccccacggtggctgcgtgttgagctggtgagagcgacataggcagggtggtcagtctagagactgtcgctgtaagccaggaaacgacgctgagtggtatgggcccagggccaggtcccagtctcagccccagcgcagcagcctctgccacagccctctgcagacctggggtcagtagccggcctagggaaagccagcaacccactcaggatccctcagggcccctgacctgggcgggactctcagcccaggaagagtccctccggattctctcgttcagccagcggcccctggtggccccaagttgcattacacagtctcagagatgacagcccagcttggagggtgtcaggcaccctgtcagccccagagaaacctgcttagctctagagagcccagcccggctctggagagcccggccattctaacagccctgaaggcgatggctctgtaagaggaagattccatcccaaacctctctgaccagctcctgggctttgtagccaaggagccacagcccgtcagccttggtagaaccacagcctctcacattgtttcctaaaacattgaccccacgtctttgatgtgctgggagctcaccatgtcaccaccgcttggtgatgagaccccatcctcctgcccgccaccagcaccacgtgggtgcccccagccccatcccaggtctgccagcagctgcgtgtccctcccgttacccaccatgccctgcttccgtttccctcctgttgtccacacaccagtttcactgtgcttcctggagctggggccctatctctgtgtctctgccaccatccgtagtgcctgggatgtgaaaggcgatcaggaaacgttaccggaaggcacgtatagacgtggacctgtgggctcgggctggctgcgggtcactggtccctgcatccttgccagcctccctcatggaggctgacgcagacgtctttgaatcatcctctttctggggagagaagtcattgcttgctctgtactgacgaccagtgctcgggacgtccttcccatccgagacttcaagatagaaaaacatccctatttcaatccctttgtgttttgttttttgttttttttttttttgcttctgtgaaactgaacttcagagacttctatgtcccatttgagatgacttcatagaattccttctcccgttcctcttaccccagcattaccgggaggttcagtgttcattttttatatgataaattcagagcaggctccgtggcttgccaagcaactctcactgacaaaagtgtaaactccctgaacagacggcctctccagtgagtagagaggccagccccagggagtacatgcctcaccagcggcttctcttccctgcccctcaggccgttcctcaactaccagaggatgtactacgtgttcatccagatgctgtccagcgggcccgcctggctggccatcgtgctgctggtgaccatcagcctccttcccgacgtcctcaagaaagtcctgtgccggcagctgtggccaacagcaacagagagagtccaggtacggagtgtccccagccggggcgggggtgcctcagggccctggccttaggattgggagatgaccgttttgaaagacagtgtgaaaggtttggatttcatgaaacgtgatcagttcaggtatcactaatgagtgtcctgacggtgcatgatgttaaacatcaggtacatttgcgatgaccgatgtctaattttatgtttcaacctaaacagtcatctgaaatgagacacaaataagagaaaaaagactgatgcaaaaggcaaattatttcatgtaaatggaaaccttttttaaaattaatcattactttaaaaggttgaattacataatttttaaggatggtaaatctggctggaaacggtagcatctgtatcaggaaatgctggtattggtggagctgcttattttacacactcccaagttttaggcacaagcagaattctgggtccagggaagacgtgacgatgccgagtgtccccccaggtgcagggtttggcaggtgtgaggacttagctcccggtcccccatccttttcagcagctggcctctgccttcaagctcaaccctaaatcagaggcagtgaccacgacccacctctgctgctttactgggaagcctgcctgtcctcagagggccgctgcacctgtcacggtccctcaggactctattaacaatgcaagttttcaagtttcatccccgaaatttccaatcactccttgaggtggagccctggactgggcagtgctgaagcccaatggggaaatgaggggtgggggcccctggcagtggctgctcctgcagggtgtgaggctccccaggtgggaggaagacggggagtgagtgggggccggggccccagccctgactcactcacgtagctcagacacccgggggctggctcccagcggtgctgctgtgctgggagggaagacaggttgccctcccttggggggcacagcctcacccaccacccacctccaacaatcagaatgggaccctggcttgagagctttcttgggacattggtgccgatttgaaatgttgaaaccgatgccaccagttcccggcactccctccttcatgcctcctgccacagtttgtaaaatcagagcgagcaaaactcgtggtgaagagactgcctctcaatgtagtgaaaatgtccacacacagctccactgactcgggggccacaggcaggagaaacgcagcagaacgtgccagttggctgcttataagaaggtcccactgaggggcctctgtgcaggaggggagacagtgggagcaggagccggggccctggctgagactccgcggcccccagtgcttcaggggaaactcaccggccccaagcagccactcactgcccagccctgcctgtggcccgagaagcagctgtccagtggtggttttctctaagcacggtccttggttactgagctctttagctgtgcagttccacagcgggcacacgtgttcatgacagggctctgtgcatgggacacgtgttcataaccacatcccatacatggggacgtggcagacacacatgtaacaaggacatcaggcacagaagagacagcagggctgggggtctgaccccgagagagagcaggtgcagcttgggggtgtctgctgggcccctagctgtggccacagtggtgtggcttggggtttgcacgagtctcagccccacctggcccctgggtgcatgtggctgcagaggtgcttggtcaaagatgcctgagcaggcaggagttgaactcggggggttaggagggcctctccccgcaggagtctgggctcttccatgcactgtgcacgcagcctccagagtcggggctgccgagggccacgcccccggatgtgtctgaccacaggccctctgctctgcaactcatctccaggatgggtgggcactttgggaatgccagtgaggaccctccccgtcccaccctttgtttagaagcccctgtattgctgtgggtctctgcgtcccacaagagccccgggaatgcttatgaacagctacacagcgggacctgcagaaggcataaagcagggggtgggaggggctggcgggtcacggtggggggcaccagtgtccgcccagagtgaccagaagaacttgcacgtggtggcgagcctctgactaactcagctctgtctcttgtttctctttccttcccatttccttccgtcttccgaccgctttgcctaaatcctcacaccttgttcacacacccctgtgtgcgtggccgctgacctcgggactaagactaagagccagtgcctttctgtcgagcagtcaaccatctttatgctttctcagacttccagcagcctgagtttctgatggaacaaggtgatgctcctctgccttccacgcacctgggatggtagacacggggcagcagggccatgcccatcaccagagccctgagtccacgtgctctgacgcagcgtccaccaggcgctgggtacagcagcctcacgtcgggaagtcccgccaccacttacaccttctcatgcacagactgatcatgggctgtgctttccatcagtcacagttaaccagggtttctccctcagcgtccgtgcagcctcagaacccacctgtgtgagggttcagacacagctgacagcggagagctggccacatgacccctcacacaggtgtcagaggggttcctaagcaggaaggtgtgagagtttgcaattcacaggtcatccaggctctgagctcacacacccttccctctgcagcctgtagagcgtggatcacaaggcctcctccctcacgcacccacttctgtgcccattctgcagctggaaagactgagggcagctaggataacacggtttgctcaggacccatgcacatttcagaaaaggggagccaggctgagccacacaactggagacaaagaggggacggaagtgtttggtgtcaaatgtttgaccaaattccctttttactgttttttaaatgaaaacctcattgtttttcaaaaaagccttctattaataatttgctttaaaaatgacgaccttggcctttctgggcaatgtagaggcgttcacacgccatttttctgcggtggtgtccatgataagagccgagattgcaggggcctgcacgccgtcctgaagtcgcgttctgtcttttagccgtgtgctcctgcaccaaataccgccttcacgcatgcctccaaatcagtgatgctttgaaaatgcatacttggtattactgttttaccaaatgcagcttagaaaaatgcccaaagcagaaaaaggcttcttttccctttaataacatcatcttctatatattttaaacaggatttttaactgacaaaatggtccttttttaagtccaagcaattaatcagaatcaacagttttctaatttagtgtcatcagaatttgttagattaaattgcagaatttcatctcaccatttctgtacttgaagacatttaggatgaaattattaggaacattttaatgactcataagaggtccttaagaaactgattaaatcatgccaactctgagctaaaaataagcattctaacgattcatgtagtttgttgagagctgatttgcttctgagcatgtacggaagctgagcccggctgcgtagagacagtggcacggagtttctcctgccccctgcgaggccttgggccccggcatgacccccacagacagggccggcgtccacacttgaacagaaagcgcctgcagccagcacatgcccggcgcacacgggaacacgccgtggcgccgagaccacctgcgttctgcaaaactttggaggaataaacgtgtcactagtcctcacgtggggcatatgttacttccagtggatggctttcttttaacctgttcctacggaaaagaaaagcatcacaggcctcagatgtatatgttatatatgtgcgatttgcacatatatgcccgtgctggcatctctgcgtatctgcatgcagttcacttctccgtcactgtccccaggaagggtggcagcctcatcctctgtttcctacttctcctcacctgggcgtttgcccattcagacgtgcaattgtgcaattccaagcccgcagttcttcagctcctgtgcttcccttattccttgaataaggctgggctacaagatctcagtggagttctgtgagcacgctggactcaggaaagtccgtcgcagggccctggtagagcggttactggagctcgctgtctgccgtggaagtgggcgtgtggctgaacgtgtggcttcaggattccagcggtgcctggtagaccttccagccgagggacctcagaccctctgcctcccgcgggtgcatggcccgtccctgagcctgtcgctgtctcagttctgggctcgggcccctcatgggagcggccctgctgggacagtgttttcccaagacgccccaagccctcgccctggcagctccatgacaccccatgcagactccaacaggggcttcgagcctcttcctgctggggtcccacggatggtgcaggcagaggcccgagcactcctggtggccccgtgtggcccacgtcgctcagtatctttcctcgccttgcagaggggtgtgaagcacaaggctccagtccaggccgcacagagcagcgatgggcccctcctgaaggacctcctacggcggccaaggcgcagttagctccacgctaggtaactgtgcggctgctggacgccgcccgtgtgctgtgactgtcagacccgtttttcctccaaagttgtgctgtgctgtgctgtctttgataacaaaggttcacggtgagaaagagcagccctctttacacacacatgcatttgctgtcccaggtaagtaacacgcctgagggcaagctgaccacacatggaacatgctgtgcacacacacgtgtgcacactcaccccacacgcacggcacacagcctgaccagacccagcatcgtcagacacaggctcacgatcctggtctttcgggggacacagcttcacttaaaaggcccatcaggaaggaccgtgctttgaaatcaaacgtggttattgcatggtttgtgtggaactggggcccaggcaggtgtgagtgcaggtcttctgtgtgccagccggagcacatagcttgtcgcctctccaacagacatggaggccatgaagacatctgctcctgccagcatccgccgctgccccctggtctaaaagtgggctgacctggggacggcccctcatcagacagatgcgtgctgccggcctcctgccgctccccttgctggtcagacccacagggcccgtgcacatccggggccccagtgggctgtcagaagccatgcaggccccatccgtatggtgacatcctaggcaacatgtcaaggggatgcaagctgggcacgtccagtactaaatcaacccggtccctgtggggtggggcctgccttccctggggcagtgagttcgccttttgttcaagggtctctgggtaccggtatggcgttcgagctcactgcacaggaagccagctacagggaggaagctcgtaggtttcccgtccatggcctgtatccctggggcccctgggttcttccctgggatggtgggacagggggacggtcactctgttggtactgaaaaggagaggccctcattcctagacagagacccctcgcctccatatggcttctctggtggggtggatcccgcccggcctgccctcaggacgagggtgtgtcctgagttgagtctagcagttcctgcaggaggcgatggtagtgagtgcatcccagagtggctcaggtcaccccaggcagccccgtgggtatccctgagactgaccatgtgtctcgttctctcagcagaatgggtgcgcacagcctcgggaccgcgactcagaattcacccctcttgcctctctgcagagcccaggctaccagagcacctgtccctcggccgcctggtacagctcccactctcagcaggtgacactcgcggcctggaaggagaaggtgtccacggagcccccacccatcctcggcggttcccatcaccactgcagttccatcccaagtcacagctgccctaggtcccgtgtgggaatgctcgtgtgatggatggtcctaagcctgtggagactgtgcacgtgcctcttcctggcccccagcaggcaaggaggggggtcacaggccttgccctcgagcatggcaccctggccgcctggacccagcactgtggttgttgagccacaccagtggcctctgggcattcggctcaacgcaggagggacattctgctggcccaccctgcgcgctgtcatgcagaggccattcccccaggcctgtgtcttcacccacctgccatcattggcctttgctgtcactgggagagaagagccgtccagggacccatggtggcccacatgtggatgccacatgctgctgtttcctgcttgcccggccaccacccatgccctccatagggtgaggtggagccatggtggtgcgtcctttactcaacaaccctccaatccggatgctgtgggaagggccgggtcactcggataccatcatccctgcggatgcaccgccgtaccctgctcatctgggagtggtttccctgcggttacgtccaagcccgcctgccctgtgtgttggggctggctgagtttcggtctccccatcaccggccgcctcgtggagaaggcagtgccacgtgggaggacaaggccacgccggcagcttccagccctgccgcagaagtgccaggatgtccatcagccactcgccagggcacggagccgtcagtccactgttacgggagaatgttgatttcgcgggtgcgagggccgggagacagatacttggctgtgatgagcagacatcctctgtccccgtggaggggtcaacaccaaggtggtgttcgtgcaccagaacctgtctcgggctgacgggggtggcacacaggacacgggtggatcccaacaggcagcaccgcacctctgcccgcctcccgcactgcagctccgcccgccgggctctgcgtccccacgtcccctcgtcccatccccacgtcccctcatcccgtcacctcgtccccacatccccttgccccgtcacctcgtcctcatgtccccttgtcctgtcacctcgtccccacgtcccctcgtctcctcatccccacgtcctctcgtccccttgtcccgtccccacataccctcgtccccatgtccccacgcagggctctccttcgtcttaggatctgtccagcgctgctctgggtgggttagcaaccccagggctgctgtgataggaagtccctgttgttctccgtactggcatttctatttctagaaataatatttgacatagccttaatggtccttaaagaagacatttcagtgtgagattcagacttcagacgctgaaactgctgcctttcaggaaagcaccaccaacgctggaggaggagccggccctcacgcccgccccgcgccacgctgtggaacggggctccggcaagtgaaacccagagggtgtttccgaggtgctcgacagtaggtatttttggaagctcagatttcaccatttgattgtataatcttttacctataaaatatttatttgaagtagagggtaaatcagcggtaagaacagtgaacacagtggttgggataaaataaggtgacaaacatcacaccaaagatgagggtagcgagcaactggcttgagcagacagaacggggaagactccactctgtcccgaggggccagccgcaggcgtccccagggccaccctgccctgaggtccttgtgtggccgccctggcttggcagccctgcccacgctgcccccgcaaacaatggtgtgtgcgtttttacagccctttttaggaacccaatatgggcataaatgtaacacctgtagcgggggcagattctctgtatgttcagttaacaaattatttgtaatgtatttttttagaaatcttaaaattgcctttgcactgaagtattttcatagctgtttatatctcttttattcatttatttaacatactgtctaattttaaaaataggtttttaaagctttcatttttaagtttatgaaattttggccactttacatttagattctggtgagagttttgactgaatgttccaatctctgatgaatgcgaattttcagatttgattttattctctacacacacctcttcttttcttggtatttctggtggcagtgattagttgaacagcacatttaaggcacgataatttgctacactttttctttacaatttgttgcaatttcatctgctttctatgtttcattgttaattgccatccttcagccttaaaaatagaagattctcacgtgaaggtttagtaagttgggtcccagctctgcctgtgtggagatagtcaccatgtacctctgacaacaagttttagtgtgaaagtcactaaacttttacacactcccaaacgtctttttaaaaattgcttgggaaattattaaatgaatgtgcctgatgatttgaaatagacaaggggcacgagataaaaaagaaaaggatgagaagatcctcagtgaatgacgttgcagggtcttcatgcaattttccacctcgcagtagttagtatttacttgccttaaactaactttgaagcaagtaatgtcaactttgagcactttgttgagttttgaaaaatcttatttgttgctgcacaggttaataaattatcaatttgtaattcagcatgttggtcagagacacggtcactgattcacacccagtccctgccacagaccgtctcagacacgcacagtgggcctgctgcatgattcacacccagtccctgccacagaccgtctcagacacgcacagtgggcctgctgcatgattcacacccagtccctgccacagaccgtctcagacacgcacagtgggcctgctgcatgcgtgttacctggcttttggctccacgctcactcatagccatgtccacatgggggcttgcacacaggatcactcacatatgtacatgtacccaccacaaacgtgcaagctcctgcacacatgcatgcacacaaacgtgtacacaagtgtgagctcctacacgcatacacacacacacgtgtacatgcaccaaagcatgtgtgacctacagacatgcagaacatgcacgtgtacacataccacagacacgcgtgtgcatgctcctacacaatacatatgcacatatcatgaacagcgtaagttcctacacacggacgtgtgatacacacatgcatgtacaggtaagcacacatgtacaagctcctacaggcttgctctcacacacgtgtatgcacagcagagagacgtatgagcttctactgcacacatgcacacacacacgcacacgtacattcactacaaacgtgcagcctcctgcacacgtgcacattcatgtgtacaccacaaatgagttcccagacgtgtaaacacacgtgcacacatcgtacacatgtgagctcccacacgtacacacagatgcacatggacacaccccaaacacgcacaggctcctacacacatgcacacacgtgtacaccacaaacgagctcccagacatgtaaacacacgtctcccacacgtgagctcccacacgtacacatgcacatgtacgcaccacaaacacatgcgcaggctcctgcaggcgtgaatacacacatgcacacacatatacacacatgtgccacaaacaagtgcacactgtcctggtgtcctgcactgcatcctgcctccttgctgaggggcccctgtgagaggcctctggatgggcatgggaagatgggctccctggcccccagcccatgcctccctgggatgaagagtccccctcctggcagaatgtctgggctttgcagagcaggccccgggggtgaagtcgcagcttcacttacaccagctgctctgtgagcaaggcttggtgccctggacaaggcccttcccctttagggaggtccagcctcgcaagctgaaacctcccctcggctcagccctataccaggcggccacagcaggactggccacacccacgccgcacctcatccgtgcacgcgtcggagcacggccagccttccgccacgagccagctgggaagggccgcggccgcctaaagccccagtcaacccagcctgtgtctgagcagacagggcgaacaagcaggccacaccgtctcgagggaggaggccagatgcggccagcgtctccaacagggtgaccatccgctcggcttgctgagcgtttaaacaaatgtttagacaggctgtggggactcccctgagttgagccttggccaggggtccggtgctgtcgcgggaaacctccagccttgttcttcaaaccactcagctcatgtgttttgcactgactagtactgaataatacaaccactcttatttaatgttagtattatttatttgacaactcagtgtctaacagcttgatatgcaggtccttgcatcctacatttctttaggaagttacccatttgtaactttaaaaacaggaaaaatatcagttggcaaatgcaatcttttttttttttaagctaaaggtgggtgaactggaatgaaaatctttctgatgttgtgtctataagcagccttgatgggatatgttagaagtgtcatgaaagtgtgattctacttttgcagaaaaatctaaagatcaatttatatagctttattttttactttatcaaagtatacagaattttaatatgcatatattgtgtctgacttaaaattataatgtctgcgtcaccatttaaaatgtctgttcattatgtaatgtaataaaagaaggtcttcaaaaatgtatttaacatgaatggtatccatagttgtcatcatcataaatactggagtttatttttaaattattaaacatagtaggtgcattaacataaatcagtctccacacagtaacatttaactgataattcattaatcagctttgaaaaattaaattgttaattaaaccaatctaacatttcagtaaagtttattttgtatgcttctgtttttaacttttatttctgtagataaactgactggataatattatattggacttttctctagattatctaagcaggagacctgaatctgcttgcaataaagaataaaagtctgcttcagtttctttataaagaaactcacacaa

SEQ ID NO: 5 - DNA, 30576 bp, Homo sapiens
aaagactgccctttctggacgttgcaaactgtgacatataaaagctgttagctgctcctctagccagcagcattcaaaccttgcagagctttgctctcagagagtttgtaaaaagacacactcctcttacaagagttcatgctaccacatagcaaagaaccttaaatttttggaagaacaatatattcattttggcattgtgcagaggtaagctatttagctcaacaagtttatattgcatgcattgattttaaagtagctcacatttttttaaagaaatgagattggattactatgacttttttgtatgtgttctatcacttggtgtgtctatatgtctggcagacattatcagcacattctctgttgttacctgtgattcattttttcttcactctccaggtgaatttcaattgctgaaaatttcccactgaaaatatgcagtaatatattttgtggttcagacatttggggcaaatggttcacattcattttagggttagtggtcatgctgtttatttttctctgctatacaaagttcctcttaggggtctgcctcatgacactaaaaaatgaatagagattctactgtaggttatctcctaggcttgagttcaacatttgtttggatttttgaagaaagtcaaatcaagcaatgctcccaaatgatgtctttgtaaattcataccctctggccctattttttttcatagaccctaactctacctttctgctttaaagcaaagtaaactcggtggcctcttcttctccacccctcaaaatgatagcaatctctgccgtcagcagtgcactcctgttctcccttctctgtgaagcaagtaccgtcgtcctactcaattccactgactcatccccgccaaccaataatttcactgatattgaagcagctctgaaagcacaattagattcagcggatatccccaaagccaggcggaagcgctacatttcgcagaatgacatgatcgccattcttgattatcataatcaagttcggggcaaagtgttcccaccggcagcaaatatggaatatatggtaagaagaattcttttttttttttttaagttctgagtgagaaagctttatattgtacatctgcagaatctcaaacgaccacgagtgtttatatgtccgggtatatggactttttacatattttaacctaaggttcttatgtgcctaataatgttgagtactgttgcatcacagaatcagagagacagagaggtccagagagacagagacagacagatagagagaatctatgtagactttcttctgtgagttccatagctactggtgaattgtatcttatgtaagaatcatagataaaaagtggggtatgttgactgatcacatttggaaggtccactttaaaaaaagtcacatgaactttttctgtgctttatctcacagtcatatttatcagctatatcatttcttgaaaatacttcttaaaattataggtttcatatgcatgatttattctctgggtaggtgtcttttcccttttttggacaaagttcttactgacgctaacctatttgtattctaagagaacatgctgacttttttctccttgtgatttaatgctttgctgtccagataacagtgaagccagtgcatttgcacactgttccaacttgccgtgaacacattttttgctctttcttaaaaatagacaatgtttaaatcattttacttagaaagtaaaaaaaaaagttagtattgaaaggaaaaagtcttgttaaaatttttatttggttttgaatttatgcaaggttatgatttaaagtccagcgtcttacaagagcacagcttggagcctgtttaaggcaatgaagaccatcaatatggtatttccaaattggggtgaggggagggggtaccactaacagttttatatgtgctgaattaaaatttgggatttttatcatattctagattcacttgttttatgtaaataagttatattaaaaagtttggctagttgcagatgccaatgtcacaggaaaactaaagacttgctaaatgatgtaacagagtcacagttcatagaagtacaatttagactctgtgaaaatgcattttcctagaatttataaagacagagaagatgtaatcagtcctggtgtgtgaggagcagtatagtctcatgattaagaatatgggctatataatctaaatgcttgggtttgaatcctagtcctgaagtatatgctgaatgaactcattaccacactgtttcattttcatcatctctaatatgaagataaaggtggtatctgccacacagcattgttgtgagaaatgtatgagttgacgagtaatcagaccagagcctgttgctaactagatgttcaacaaacattagttttgatgggtttctttgaacttcttgtgaaaggtgcccagtgaaaactcattcaagatctaaagacaaaaagttacccatacagaagagatgtttttagaaggtgatgtaaatatgtaaaaattagatgagcaaacacatttttaaaattactaaaatgatgaaataaatatgcctaagataccatgcaagctcagaaaggcataatatcccaactatgagtttagagaatttgtagcaatcacatgactctaaagtgagaaccaagactgctgagccagctttgaaggtgagctcatctgggttcaaatcctaactctgctgcttactttgtggccttgcacaggttatttaatgtgtctaagacccaattcatttatctgtaaaatgagaataacaatactaaccaatcaaagaatgcaattcactatttttatcctattgaggtcagagcgttcaccacgaggaaaggcatagttaggtaaacacagtataagtaggttgaaaaaagccacattttttctagctctattttcccttatcaagaattaattcattccacatgcatttatttaattgcttccgtatgccaaggacttgactaattgtttccatagacgatctcatttgatagctcacattctccgtgtgaggttaacattgtgatcttcattttacaaatgaaatcactgagacccacagatgtcaacgagtaggccaaagtggtaaggataatgaatggcactgctggaattagaatttaggtctgtgtaatttcaaagcccatgcttctattggggagcatcttctcatttgctgcattgaggaaatgccccatggcaggacccctgaagatgtacagttatctttctttccttctttaaaatgccagctgaagtcctataatatccatgctctatttattattccattcttattatttttttgaatatcagaaccactatatatgatttattttgtaagaactagctccagtgctgattacatagtaggtgctttctaaatgctccttaattcagtaaaagtaatgagaacagtaagtgctagaaagtaaaatagggcttgtttcaaaaactcatgtaaatactgtgcatacacttcattcacacctgtatttgctaatttaatatttattaaatatttaatatttgttaagcattgactatatgttaggctacataattggggatacattcatgaataaaatagacatctttggctccctgggtggggaatcagacaataagccaggtaaataaataagttacacaggatgtaagatgataaggttatgaagaaaaacaaagtggcttgtggtaagggtttgatttttaacaagtgttcaaggaagagtcactgaaagagcctggaggcaggcaagggagtgagccactctcaaaggtgaaggaagagtgaggagtctagacaaaggtctggaggtgggagaatatccatcagttcagttagaaaaatgtgctcaattgagtgaaatcataagttagaaggactctttgagtaaactggtcactgggaagagttcatctaaatccgtcatgaagacccagagggacttggagggaagtaagtatagtaggtggcttggagattgaagcagggactataagtgacttgaattctctaggctatatggaaaatgcagatcttagtttgatactattacctttagttaaacttgttcaacattgatttggattgtgagcatgtgaaagatagtagaattcctaacctgttctatgtacctcagaaacttaggacacccctcacttgatacctcacagatatatgtgctgtgatcaccagctgtgtgttcaacttctcctcagtgagtgatatcacccaagggaacttaacagaagatggtctttggctcagggcttctaattgcatcaacctagtttgtaattccttttacctacaactctctgagccttttaccactccattttccttccctctaaagtctcttccttagtttgtttataatactatccttcaagcttttgatgccagaatgcttctaatatccatgaccacagatgatttatcctagttttgagctgtggtagcccttcttgtctactcttatcatgtcttgctctcatgaagtgatttacagttactttgtgcatttcttgcaaactttaattttgagctttctgggtgctgtgtctatttattcatttttgtatctctgttttcttgggcaatttcttgtgtatagaaagtgatcaaccattatttgttgaatttagatgaaatccttgtgaattgttatgtgtttataattagcattaattttgatattataaatgtcttaacagagtttttgtcatcatttataatgatatttgattccacacctgaattaaaaagtttttcttaaattctaaaaaaaaccatatagatagaacttaaaatttgcaagtaaaacttttttactcttggcttctgttctacaattagtttattgactatttccagagcttcttgcacaccagctgttttttattcttcctgagggtagcttaaaccatgactctaaaccacaaaccacactagtttcttagaataagaattatctccaaaagaataaaattgcaagacccacacatagagtaaaatttgtaggatgttctctgaatttaagtcaattgaataaattaatttgaaaaactttgaggtccctctatgagagaaagagatccaaagaaaacaaacatttttgtctttaaagtctaaacaatgcagtaaaaacaaaacaaatggaaaaaaattccactaaggatataattcagtataatacactgctgtataagattgatgtaataaaagaggtacagaaaaataccatggaggagttgaagaagggagcgataatctctagttggcagatcatgaaaggctccttggaggaggagcatgtgaaatagatgcccaggaagggtcaaggttggctgttacagaaggcaaagcaatgcatgaacaaaatctccagcagagaaaaaccatgacacttgagctgtatttttgaagagtttgagaaaaggttgaggattccttactccaaaggcaattaggaagactgtgaagattttagagaaggattagggatgcgttttagaaagatgatcctggcagttgatggagctgatattggcagtgaaagtgaccagagaggtggtaactcccgagtaagcaatgccaatccttcaggcaaagataaggaagaaccgcacagctgctccaacataaagtggcaggcaggagaactccctgaagtgtcatgggtgagatggcagccttcacagatggtatggagtggtggaaaggcagatgagggacaatgtgaatataatgaaggaaatgaactgatcaccttaaaactgaaaaaaaaaagtgtaatgtaattttaagaagccaaaataactatattgataatacagtatctcttttatttgtttgatacctgcaaatattatttgcagagctacagatataaggtttcctatcatttttggaaaaaagaaaaatactggataccaaatcacagcaggtagtaaagttacagaaagcatgacttaaatgaatgaatggagaacagattaatccatgcttgaaaagagcccatgaactatttgcctaggatgataatttatgacttgggaataaacaaaaatgctgattttgtttgtttgggcttcatgtggaagagaatgtggaaaaggtaaactactttttgtttttctttcttcagtagttgattaaacacttgtagtatctatctttatatatacatgtatatatcttttttttaacaaagccatataccgtcccacaaggcgcatttcctctcatttgggaaggataactcaatgttcttgctataaacatgagaattttaatgtgtataatgtaaacctctccaatgcatgctttcgtgaccactagaaggcctcctgagggcctctgccagaaggcagtgtactgagaacaattgctggcaggaggcgttttctccagcacattcagaactctacattcctgctctcctggatgtaaaatcttttcaatgtcttggcttcagaaagagactgggcacattttgtaggaattttcttccacggtgcacgttgcttattatcactttgatacgcctgaagaaggtagtaaccttaaaggttcttgccttttgttccgctctccccacagggagccagccaaaggtaagaacattttgtttgtcaccattttcaatataggttctgaaaaatgcaaatgtaaaagcagtaacaggatgtgatttgaaacctcagcatcaggtggcaggcagaaaagctgtgaatcacaggtaggccacataggtggtgactgtacttccgagtattggacacagtttttttggtggaaaatgatatttgaccaaatgcaacattgtagaaaaataattttattgtgtttctgttgaatatttatagagcctagcatcatgtctgctccacagagaatatgcagtgactactcagtaactatttgtggaataatcaaatgaggtcctttaactttttctggttagtgtgtgactgtggtgctctggggggcaagagttgtacaatgttcaagcacttactccataatttttactcgtgtgcctggcactgtgtgctgagggagtcagtggggagcaaagggactctctttggtaggaagtactgtgaacagacaagtcaggtgcaaggcagtgtgctaaatgctgaactaggatagatacagggttctttggaatcctgtgggaagacctagctcagatgtggagtgggggtaagaaggtagggaaggcttccagaaggaatgattttaaatagaaaatatacaaaataaataaagttatacaggtgtgagttaaggaaagagggatctgtagtgggtataggaggatgttctaagagggtatgtagtacactcgagacatggataaaaactcattgaggcttggattagtgtagagaagaaagagtgatgtttgatgaagttgaggaaggcacccagacatttgttcgaatttcattttaagatccagggtaatcattgaaggtttcaagcagggaagttatataatcaacgaagtgaagaaaagatgcagtcaagaggctgttaggatagtctaggtatcctcagctacgtttaaggcaataaggatataaaaaaaccataaattagaaccgtgaaatatgtaaggtacaaatccataggagtaagtggtttacatgatgaagtagaataaggatttatatgatgaggcagccaaggaggatgcctccgtttttgacaaggacaattaagtttctctgagttagagaacacaaaataaagagcagaattctggaagccattagtggctgcaggtttatcacccaggacacgcacctctggaggttgaaaaaagtagctagtgtgggggaaggaacattcttctactacaaagaattttggatgggtatatccttcggtagtcaaaatgaaccactttgcatcatagaggttgggtagtgtagtggagacagcataggtgcattattttatacctgggaatctactcaacaaatatgcaagaaaatacccccctctgtttttttaatggtgccatgaatttagtatttatgaaaaccatttaccattaaatagctgtgaacttgaggtatttgcttgtctataagaatttctgaagaatagtatgaagtgggcacagaagatataaactaacagtttaaaatggtcaagaaagatgtttggcataaaatgcaacctagactgaggcttggagggataggatttgaattcttccagtctatgttatccatagtatctgaaatcaggtaccaagcatttttcttaacacaaatatggaagaatgcccaacacgttgcccaacaagactaaacttctcataaaatctcttaaaatttcacaccacatactccaaactgaagtagtccaaaagtgttactcaaggacacaataatgttttctagtaaaaagtgcatcaaattcacttttaataatttagttaaatatgaacattctaccaaatctatctctctgcattccagagagatcatgttttcagcaggccgtaggtaggcgggaaggcatttgaatccttctgaccaagtgggcaatggcaagatatgaggtttgcaggagtatcacaggagagttcaacaatctaaaaattagttattaaaatataccattgagttggtgaaaacaattaaacacatgtagaaatctcttcctggcttataattttaatattaaatgatagctggtgggtactatagttccctggaaagtgggatgattgttagactctatcaacaagtggtcttaaaatttaaagctaaaacatgtattaaagagggatctacagagatgaattaatatgttttaaaacatctaaaatgttctctaattttcagcttcttttgcctgtaagcaagctccttagaatctccttataattctgtttctgattatctagttgcttcagggtttatccattttcactttacctgattgcctggttagttgagattaattcttgatgtctcttaaacttccggctgccagataatgtgatcaaaagtgcacctcactgcttttcattttaggtgactgattctaccaccattcccaaatctccaacaataataatagccaccattaaatacacctttgccctgctagagctgtgctacatacacttcagtcactatctcatctaactctctcaagttttgagagatgagataattttcctcatttggagatagagaatcttaagtttggagagcgtaagtaacttccccaaggtcatagagcaagtaaataaaaatgttaagaacacaattctatctgacaacaagcccatgctttaaatcaggggtctccccaattcccaggctgcagaccagtgcccatctgtggcctgttagaaactgggctgtgcagcagatgagtgagcattgctgcctgagctccgcctcctgtcagatcagtagcaggattagattttcacaggagtgtgaaccctactgtgaactgtgcatgagaaggatctaggttgtgcactccttaggagaatctaatgctctaaagcctgatgatctgagatggaacagtttcatctcaaaatcatcccttcccacattcctccctggaagaattttcttccacaaaacgttcctggtgccaaaaccactggggagcactgctttaaatggcaacgtaaagtacctgttcctcttcctgcgttcatctctcctgtttctgagccctttggatagagaatttccctacatggatttcatctgaggatattgctgaatgttagaaagaatttcttcatgtggaatcaaatctttctctttgtattatttatacccttggaaatcatacagaaaaactcacaggctagagcatccagtctcagaatgtatattaagagggaagaaaacctatatgtcatagatccttgactcagtggatccagtcaccaaactccttcttagcctcaagaccctttgtgttaaacatctacacacacaatccttcccatccagatgatgccagcataagctgtcagggaaggctacacaaatacatttgatttctgaagatcctggaaaaggtaagaagtttatcattaaggaaatggaaagtcaaggcactcccacctgccttttactccacatatgcacgcatgaacagtgacagtgagatcatcttgggacctggaagctgtgtggccctgagcaaggaattcccatcactggttgcactttctggttgggttacaacatgtgtgtgttcttctgaccatgagatgcctagaatttatgtgacaaattactctccaattgctctacttctgtggagttaacttggcagagtcagtgggcacattctcctgatgattcacattctcctgatgattcacattctcatgaactaagctgcttgtaggtcacataaatgtgtgttgtaaatgcagacgatgttgttataatggaaagggattcatttttttcatctttgtttcatttatattcactgcagtaaactcatccagtcttatggattaaaataccacttatatgctgatgatgtttcaaattatatttataggcctctcagttgaattttagactaatttattcacctacctacttttccaaaattgagctccagatattcacaaccttacccccatcccttcaaatcttactttagaattttttttatctttttaaaaattttggattttcagaaagtttcatacaattctcacgtgttacattgggtatttcaaccaataaagtcatttagagtttccgtgaacatagaaccactttgcaagtacacattcaaggtctccaaccttgaatttttgatttgatagattcaggattgagctagacatctgccttctcaaaagttccctgggagattctagagttatttccctggtgagaaccctaaaatgtgctttaagatcatggttcaggattccaaaccaagttgagaaaaatattatatggttgaagtatctacttatctgtctatatactgaaagaattaataggttaaagcaaaaattattctggggataatttccgtattatcacataatttcacttgactattcattcagcacctacttctagaaaacatgtgagcactatgggtgagctatagatatccacaacagggaatgaaccttacttgggaagtgctttattgactaagaaaacttcaaaagaagcaaatttgttgttttcaaagcacttaaccaaaatatggtttcacagtgcacatttaatgatgcatagacttagagcactggaaattttattccttgacttttttaatcaacaagctatttaaatactctttctcaaaattctatttttctttcatgtattccttcattaatttatctattaaggctgtattgagcacacccttagtgtctctttcaataatccagataacaaatgatgatggctttgaccaaggtggtaactgtggtggtggtgatcagtggttatagtctagagatacagtattttgaaggtaaggtcaatgagatttgctcactgagcagatatagactataaaaaatagagtagatgactagatttttggcctgagcaataaagaacagcaaccagtaaactttttctgtaaagggcctgatagtaaatatgttcagctttgcaggtcttatggtttatgttgcaactactgaactctgcctctgtagcaggaaaacaccatagacaacatgtcacaggcagtggaggtgatgtgacctgtccaccatagttagctgattcctggactagagaaacggcattgtcattcacggataccaggaagactgaaggagtagttgatttggaggaatgggggtaaggttgtgaatatttggagctcaattttggaaaagtacgcagttgaataaattagtctgaaattcaactgaggggtctagaaatacaatttggaacaataccatcagcaaataattggtgctttgatccgtgggactggatgagtttacctgggcagtgaatataaatgaaacaaggatggaaaaaaaaagagaagggacttggactgagccctgggaactttccggcacacagaagttgtggagataaggaggaatcagcaaagggatagagaagaagcagccagagaaaaacaggcaagtgtagggtcatgaaaccaagggatgaaagtgtgctcagaaagagtaagtggtcaggcatgccaaaagctgctgatagaccaaggaaggtgatgaccaggagatgacctttgatgaccttgaagacagctgcttgggtggagtggggatggggtggaaaatctgcctggggtgggctcaagagagaatgcggaaagcaaaactggaaattcccagtgaagacaactctctcaaggaattttgttgtaaaagaaaggagaagaatggcatagcagttggaataggaaaagggttcaagagaggatttttacaaatatctgtgtgcttttaagatatttatgttgctggcaatgattcagttcagagcccctaaaaatagtacaccttacaccatctctttatagataaataaatttacatgaaagataatactcatcttatttaaggaaagcattatctttcttcaaacattacaaaaatcctttggatctcacctttatattttttgatatacataatatagtgtcatattttgtagttatttttgaggttgaagggaatgctttttaaatcaagtttctttaatcctctccttctactcttacagagaactattttaatatcatctaattaatttaatcaccactctcaaattctcctatgaaagccctttctcttcctctgccccaccctccccttccctggcctaacaaggctcagtgctgccctcctgtctggtttaacacaagttcttgtatattcagctgtcagtttcccttattggccatttcacaagcatttctatctaataaggataaatccgttaattttaaaacagaaccacaatcatgcctatgaagtgtttttaagcctttgactgccctaaaggaaaataattttggcatcacttaattttttaatggctttttttttcacttctataggttagcactcttttctcaatctaagaaaaagatcaaatagccctagctaaattattttaaaaataaaaacttgtctatgtaagatgcttttgctttttatattatgtatgtgaaatgacacataaacgtccaagaaaaaataaatgtccaaaaggacatgccacacagtctccaatgccattgacatggcatctatgaaaataactttatttctgtcccccaaaattcagagtctgatatttttatttttagcattttgtgtatttgaaaatggtttccatgtgtagaatagacttctcaaagttcactttaattttcataattaatattcttttttccttaaaattttaactttatgaatttttgttctttccataagtatagcaagtttggacaatcacatttatttaatgtttgttaccacttgcaaattaaatttcttaaactgcatgtataggtttaatagatttgattttcttgtttagtatttcaattgatttattgataataatactttccatatagttaaataagttatataattctaagaaatgtagcgattcatttcacctaaattttgcaaaacagcttgaaaaaaattaacagattttcttatcattgaaaatgataagaaatcataaattcaagtatttatatgcatatatattttaaattgaaaatgtaggactaacatgttactgtaatagggcatttttgtaaccattacatttattagtaatatcaaataagatcagattccttaccctaaaagcccattctttttaacctttttaaaaagtaatgtcaactttcatattttagggagtatatgtgcaggtttgttacctgggtatatttcatgatgcgaggtttggggtataattgatcccatcacccaggtagtgagcataatgcccagtagcttttctactattcccacctccctcccacccctctcaagtagtccccagtgtctattttttacatctttgtgtctgtgtgtacgctcaatgtttagctcccacttataagtgagaaagggcactatttggatttttaccttaaattttatctttttaaacatttctacatttaatttttatatttgaagttaaaggatcttacccaattaaagaggaaaaaaagtcaattcaatcaagtttaggagtggagtcccaggtaattttgggggttgccttccatttcttatggcgtttcttactagccagagatagtggctgggatttaagacaacatcttcagatgtcagtgtgctttatggtcctggctgccactatgttgaggatcccaaaacttagaaagacagttgataagacagcctcatatctggtttggatcagtatcatcaaatttttctgtctacttatggaagtccgcaacctttgcccatgcagcaacattttttactcaattttgtattcagctcaagttctaaacatctctgaacttgatgagaatcctacattcttttcatattccttctatcttttggcatcactactcttttagatatttaaatgacttcagtgtgaattctggatatgtgtcatgtcttagtttggtggtttaaacttcttgtgcttcgcaggcaaggtactgtgtctatctcaaactctctaattttatttataagcacaatagctcatggtgaatattttagtccagagctaaatcaaccaatttatgagctgaccaactgaatggctcttaataaaaaagaatggaagaaaactgcttggaagcaataaggcatcctacaagcctatgcatattctgataccattatgaaccatttttattttatgaattaaactgtatctgatttatctaatttaatcataatgtataacttctagtgggtcttgtaaatatttgtgcatatttacgcataatattcttaatttttcctcatttttaagttgaaatattttaagtgtttacaagcaaattatctgtgaaaataccttacaagcaaattatctgtgaaaataccttatctatttagagggagaagaactaggaagtcagaatgttgaatatggtttaataagagctccgtatatattaggtgcttagtttttccgaatagataacaatttgttgcatatttactaggcatttcacagaaataagtacacacctgtgcccttctttcttccattgatacatctgtagagtatattaaagtcattttaaataaatgctacaaacactcagagaaatttatcagatagattgcctattaagcatctggaaattaataaattaagtcaaatgtttatacaatttacatcctcattttctgaactttcgtcagttgttaaatgtttcccataattacaatggcaacattcattacaacttagagcttcccgataggaaagaattaatcataagtacttacggatcccactttttttgttgaaaatttctatattttttgttttttaatttttaaaattttttattgatacataatagaaatattttaggatacatgtgataatttaatacattcatataatttgtaaagatcaaatcagtgtaattgggatagctatcactttaaatttgtatcttttctttatgctagaaacatttgaataactctcttccagttactttgaaatatacactagattatcgtaaactatagtctacttatctatcaagcactgggtcttatttttttctatcaaactctatatttgtacccattaatcaacttctcttcatatagttctgatagttattaaataaagtcatcattgcttgtcagtttcaaacttaaaagacctcatcatagtaataaattgaaataagtggagactaaggggataaatcacttacccatctttctctgggaattgtaaccaatggagaaagacagagaaagtaaatgtaggtctcagctttaccagaggatatgatgtaattcccaaatttcacagctcactactcaagccagactttccccttcttgagtagatgcaagttctgcctggagacagaaaggcaagaaagagcatggggccctctgacttccgctgcagtgggcatcagagggtaggtcagtcctgtctccatgtgggagtctgacagtacctgtcagactttccagaaccttcctttaggtacatggagacaggtagaaaccctcctagtttcctaaaagcaaacacagtgagagaaagcaattatccctccttccctgtaactaccttctccaatatataatatttgtgcatagaaataccaaaaagcatggacatcggtgaacacgttttcttcacatctaagttccttataatagttaacaaaggatggtcttgtaagatatttttcaggcatgagctttttagtttatctttttgacatacccaatatttagcttttaaatatatgaatgagtataaaggtaggattacatatggtaaattacttttaaagttgttaaatgccttaatttttattacttattttttattttatatatttaacatacacaatgtgatgtttcggtatacacacagagagtgagataaggaaaaagaaatgtcttgaatatttttaattatttcaaaaataatctagatttgctttctccatgatatggaaaacgccagaactgaggaagtcccaggccaatagaacacaggtcttccttgctctgatgctagggctactcaagtgtatctaaatcacaagaagttaaagatgaaagggaccctggagatgccctcattcaatctcattttacagatgagttaactgggagatcacaattgacatggcctcagtcgcagatgaccttagcagtggaattagggttagattagtcactgatccaggtcagcgctatgtgtgcatgttgtgctaatattttagcgtaagattataagaaagtgtttttagcagttacagatctgagtgcacactctagtccaatatgtacagaatgcatacatgtactttttccaaagtaactataatttgttaataaccttttaggggacataatttgttgaagctactccatctgaaattcctgtataaattaattgtaatgttttgtattgtggtgaactgcaatcaatattttatgaatccatattctgttaatatttggtcagaagaaaaaatatttgataaatcaattttcaaccaaaagaaatgttttttaaagttcatttcatccccagaatactatgatttttatatgacctctgtgagtgagtttattttgtgcaatcctaggtcaatttatgtaagatgactttgtttttcctaatttaaaactatttctgagtaactaacaaatgtcttttgaaagtaggcctcctgaggtaagagggtctcttgaagagtttatctttttttttcttattttattttaaagtcactaaattagtttctttcaatgaaatatgttgttacattaaataaatctatgcaatccattatccttgagggaaatgaagccttttcagtgatatggtcaagcattcccatgagtttgcttgaaagcttgtaacttgccaatgcatagctactaatccttacttagctgaacacaatctgatggaggaaaagtaggacaaaaaagatcaataggacatttacatacctcctcatataagctccatgtaaatataagtgatcataaaactgttgcttccttcttcatacaaggtctcaatttctaaaatatgctgctaaccactctctagtcacaatgtgaacgctatttttccaggtagaataatatataaatattataaatagtttaggaaataatgccatgacattgaactatgaaaccaattttaaaataattattttcaacaggtaaatacttcactaaattatattaccactagggaaatttttttaaacttctttttctataatgtgtataagaattataaatattctctattgtgtatttttgtaccttatgacttgctagaaaatagattaccatttcagaactgatttattactggcaggtctgcaaatgctagacttgatttcctcttgcagctatggaaatgagtatgtcaatccatatgctaactaatatgaatgtatgttaaatccacggctcattcaaattttgtcctacgatatttttcaatgaaagaaaatttaccatccatcactaacatccttattaacttagcttcctctataaaggaaagcaacagttgctatttttcttaattcatttaattgaaccatgaagtactatgtttttataacactatgtagcagtgttacttttattagtttgtttctagtttataccaacaagaatataaattatcatcgtattatttttattaccaccaatgattcaaattatattatatatgtagactctgtgggttttattacaccataatagagtatgaccttatacgttgcaatataaaattagacattattaattttggtaaaatcagtttgaataaattagataatctttgtttcttaaaatatattaatatcatggcttttgacggctgtgaaaattatctctaggaaaaccaatggactttgttggattcaaatttcagtagtcaggatgagctgtccccaagttacaactagttatggtgttttgttttaaccttttctttactaaaactgatgtatgaatgttggatctagatgacactgaaaaggcagtaattttttgtagtataaccatattgcattacagaactttgaataacagtggcctgaatttgctttcttttagttatagcagtctcaggaaccagaattaaaagaattttaggaggtctggagtggtggctcatgcctgtaatccccacgctttgggaggccaaggcgggtggatcacttgaggtcaggagttccagaccagcctgaccaatttggtgaaactctgtctctactaaaaatcacaaaatttggccggatgtggtagtgcgcacctgcaatcctagcaatttgggaggcggaggcgggtgaatcgcttgaggctcggagttcgtgaccggcctggccaacatggtgaaaccctatcactacgaaaaatacaaaaattagctgggcatggtgatgtgcgcctgtaatcctagctattcaggaggctgagacaggagaattgcttgaccccggggaggcagaggtttcagtgatccatgattgcaccattgcactccactccagcccgggcagaaaaaacaaaaacaaaaacaaacaaacagacaaacaataactctaggaaatagtagcaccatttattttgtcttactttttgtttgttatcagcaaattccgtaacgctgaagatttttttcccctacaggtttgggatgaaaatcttgcaaaatcggcagaggcttgggcggctacttgcatttgggaccatggaccttcttacttactgagatttttgggccaaaatctatctgtacgcactggaaggtaggaagtaatttcactgatgcagttcatccacatggctttattaattatggactctaggagggaatttcatcaatttcaagtaatatcaacaaattcttattgaatgctcactatgtgtcaggtactaacgcttggcctatgaatattttagatgtcttccagaattacttaattaggctaaagggccagttccccttttcacccttggaacaccttcccttagcctggatttttctttgagctcgcagaatcttagaaagggtcaagcctgtgctgtatcttgccccctccatctcaggaaaaagccccatgactgtgcagaggctgtgtgtgtgtgtgtgtgtgtgtgtgtgtgtgtgtgtgtgtgtatgcatatgagtgcaactttcccaaagttgcatatacccgcatttacataaacatatacaataaaaatgtaggcatttacatatgtttatacacatacatatacatgcaggtatatgcagctatgggaaaagctattcccatttgctaggataatttttctgccactgtgcaaagtcgttatccaacactccaaatacccatctcccccaaatagggaaggaaaatcaactgtgctattattaaaactaagggaattcagactgaagtgaaaaaaatgcactgggttctaatattgtgactacttttatacatctaattctggatcatttataaaattctgatggaggaagttttcgacatggattaaataagacattgatgattcctgaaattatttgcattttcttcgtggaatgaccagacacatgtttagacaaatacagaatcacttactccagccctggccatttccatgcttggccctagttggaggaatagaggacccgactaggtggtgatggtgattgtgaggggtggatgtgctcttggatcatcatgaataatctgcaaaaagaacaatcaatttacagtgtaacatgagtcccttatatattaccactgctgcactctgatttctttcttttctttatatgcagatatcgctctattctccagttggtcaagccatggtatgatgaagtgaaagattatgcttttccatatccccaggattgcaaccccagatgtcctatgagatgttttggtcccatgtgcacacattatacgcaggttatttcaattaccttgttaatttttgattcatacttttaaaatatgctaatactattttggtggacatgcattgtcttagctctgacttctgtaacagtttattggtttattttcacagatggtttgggccacttccaatcggataggatgcgcaattcatacttgccaaaacatgaatgtttggggatctgtgtggcgacgtgcagtttacttggtatgcaactatgccccaaagtaagtaccaggttggattctatttcctggatcctttaaagacgttaaatatccctaggctgatagttatctgtgacaggtaagtgagtaaggcttagctataatggcctctaatcctcaaatccaccatccttccaatatttctgaaaaaagattagctgaaaggttacttctcacaaagacaaggattctagttcaaaattgtaggcaaaacaatctgaaatggtagggctcactaaattctccttaccatatgttttaattatggcaattgtaaaataaacactgtaccacacaagcttttaatagctatataaaataaatcaagaaagaatcttccatgatattctcatctatcagtacaaaaatgctggcttacctttttagcaaaacattggaagtcaattccttcttccttctcttattttttagattttaaaaattcataatttcatcctagggcatatataaaatggattatggaaatttatcaaacattataaatatagccatatttgtgaacattatttatgaggataaacatttatcagcatttggtaaaatgcctcttgattacaataactctttggatgataaaatgttccaatatttatatacaattctgttcccatttggaataaataccaaaatgtgcaaaggatttatgacactcttggtgtcttccaaaataagtctcaaacaaagattttctccagctattccagcatggggagggaatgagaaaatgtttcacaaataactgcattactcatttatgtggtagtatgccagtggcagtgcttttacaaagtcagaaaaatagtgattctccctatgttcccctcttcataattattagaatgggaagatttggaaagtagactgtgtctgcattattaaaaaaagcattaaaattttacatttatacgaaaattttagttttacacattgcattttcctatgaagcctttaccctttctccctgacataaatagaccaattagtacccaaatagtctaagagatttttgtttcatttatgtaactattcatttttggcccatagttataattttctaatattatcagtgagatatattattgctttacaggtccaagagattaagatattacattaacatgctacatttcagttgtaataaagaacaatttttctgaaaactaagtaatgaagaaggttttaaaatcctgattgatagctgaatataattcttccaaacctaatatgaaattatgttaagtctaactgttattcagtgggaaaaagagagacggagagagagaaagagagagaggaggaggaatggaaggagggaaagagataagtgaaagagagagagaaagagaaataatttagttagaatagcataaaataaaagaatgaatagtataagtgtataaattggctgattcactgttttgaatagaattatcctctattcaataaaatctgagatttatgtaaaagtttataatataaaatatgtaataattttacttatgatacaattttatttccaagtttttgtttctaaaaatatgtgctccaaaaatgtctgtgaaacaaatcaacaaaaagatgaaattaagatagcattagcttggcccatatgcttttataactttgggtaaatgcatagatggagggccaggtgcgatggctcactcctgtaatcccagcactttgggaggctgaggcgggtggatcacctgaggtcaggagttcaagaccagcctgaccaacatggcaaaaccctgtctctactaaaaatacaaaattagcttggtgtggtggtgcatatctgtaatcccagctactcaggaggctgaggcaagataatcgcttgagcctgggtggtggaggttgcagtgagctgagatcacgccattgcactccagcctgggcaacaagagcgaaactctgtctcaaaaaaaaaaaaaaatacatagagggaaataagattatgaatggtacaggattaggataagagagcgagccacactcataagataataggtcccccttgaacctttctgagcaagcctgtgatggtatcaaaattatgcaagaggaagcttatccttatagtgtagaataaatttaataaaggtgggcagtcttaaaatcccatctcattttgtaatatgaataaaagtttttcattttaaggatagattttcctgtatagctagatattttgtatttaaaagtctgaatttttaactgaatggttgatcaagatattttcatatcttatacatatactttgtgagtcactgcttggtcttagttgggtcttcaggaagatgaggaccacctgtttcacattttagcctcttacctattgttgtcttatcttcaaccctgactttttaccaccgataaccaaattttctcccgaccatttaactgtcttcacattgctgtctatattgctatttcttagtattctagttacttatcaccacactactgaaaacacatttattaatttctcctttataattaaaagagcaaaataacagtatggcatcatggcagtttttaactctgttaagtggagattttggtttattattatgataatggccatcaacacagtgaaggaaaaatattgacaacacaaagtaattcaattaaatgggttcagtattatcaaaaatctaatagcactaatttaaaacaattagtagctatgaatttgcatatgaaataaaacttttgaaatcacctttaattgttcctgagagacattactctcttatgagaataatggtatattggtttataccattataccatatatgaagtttttcacatctcattttatgaagattgggaaactaaaatactttgcagaagcaaatctccttttatttatgataacttatattttgtgtatatgataacttattactcatttcattatttttaagcctcccagaaaatattagtttgtttttttaatcatcctcagatgagcattagtgtgagtttaaaaggagtaagtttaagggaatatggcctgagtatgtgctccagaaatctgctgtagaaggagagagatttgagtggaatgaccctggtgtcccagggctctgtatcatcaggcgttgtaggcattcacttcttatctgtaaattaatatagcatcaacaatactaagaatatataaatatatatacaatatatataaatatatatatatatatatagagagagagagagagagagagacggagtctcgctctgtcgcccaggctggagtgcagtggtgccatctcagctcagtgcaagctccacctcctgggttcacgccattcttctgcctcagcctccccagcagctgggactagaggcacccgccactacgcccagctaattttttgtataatactcagaatagttttcaaaagcaagatatacagaataagttactattgaaataagaaatgattataactttcagtgactttctaaagcaacttctcaaacggatcatcacatgtcaatacttgtgaacatatggcttaaggacaatctacttttaaaaaatgggtgggttgcactaatgctatcttttttgttttcccttctaggggcaattggattggagaagcaccatataaagtaggggtaccatgttcatcttgtcctccaagttatgggggatcttgtactgacaatctgtgttttccaggagttacgtcaaactacctgtactggtttaaataagtttaccttttcctccaggaaatataatgatttctgggaacatgggcatgtatatatatatatggagagagaattttgcacatattatacatattttgtgctaatcttgttttcctcttagtattcctttgtataaattagtgtttgtctagcatgtttgtttaatcctttgaaatatttgaaacatcaatttctattttctgacctctaagcctaaattaagatattgtatatgtaatgatgacatagttgatgcatccaatcctaaaacttacattccaaaggaattatatcattatgttcctaaggagtaaatatatatttgacctgtaagtgtgtgtatgtatacatatacatatgtatgtgtatggatttatatatgcacacaaacatataatatgtgatgtaacatgtagatgataatatgattcagtagtcaacttgagggaaatttttaaaaaactattctcaattatatacgaggtgatgggacttcttaacacacatttctataatacccatgaaatgataatttgtaaaataacacttagtgatatctggaaataataattcaattaagcaaccacgaatttcaccctggagatattttttcttatttgagtccaccaaaggataatgccaacttatataagttctcaaatcatgccttccgcttagtctcattttattcattcagtcgtcatgagttgagtgcttactacatgcaaggcactctgctagttatattctaataatgcagagataattagacatggttcccgccctcaagaagctcacaaaagtattcaggaaataatgcagactagtgattttgctataaaattatttttgaaggaagcagacacagcagtatttacctgtaggtggagcaagtaataagccatgctgtgcaatatatacataaagcttctgcttctcatgggaatttagttacagtgcttggaatgagaaggggaaggaaagaattaacaaatgccaagatttctggagcagattgtacagctgtgactttggaaaacagaaagtaagaccctcagaaaaccaatgaagtctaagagaaataaaatttagtggacaggtatgaaaagtgtaattgcgcctaactaccagatggagagcttcagaatgggctatccttagagtctagtacatcttgaggcctctcagcaggagacaaaggattccaaaaagagatgtggaggtgctgagggcacctctatctctttgttgtttagtctgtcattgaatcaatctacttatcatcttgggtctttgagtattgtatgaaagatccttcgtgcacaccacacacagtcatgattttgttaaagtagccttcttcagatgcttttctaagggctagttaccaactttatttctgtgtttctgtagaagaaacattttcagttcttcattgagtttgattatggaaatccattcaaagtcactatgaaaattttactcatgtagtttggaaatgcaacattttcctatcatgaaatctctttcagagaggagaatacaacatcttagtccagacatttaacatactgcatttcaagtacatgtgtgtgtgttttattcaggttgtgtaatgctcccgtagaattatagaacaattaaatatggttagttccagagtgcaaattacagaaggaagctacttgtttaaaattccatacacgtttgcagtttcttgtacacatttggatactttgaaagatgacagattgttaaatccattcaatggtaaagaaactcaccatctggagattgagtctacttgttaatgaatgactagcccaattatccttataaattgaatatggtgaccaaatgctttgatatcatactactctgcctttgtgggcacatatgtagacactactaaaaataaatatttttggagattaaaatggagaatagaagtaattacattatttaggtcttaatccaacttttttctaatatatctaaacaattgaaagggaagcttattcatggaatattggcttgatttatctagaaagtttttccttcttcaattttactatattcattctacaggaacagcaataagtactattaaacagaagatggctacactaagttccaattttgttgctgaattgcttctgtgagttcacttttcagttctaaggaagaataatatttgctacatatttcacaggggttcttatgaaggtaaatttaccagattaataaaaatttatgaatattaaaattatcattaataatataaaacacttatttgagattaaattaaatttttcatgagcccctctttggcaggaactctgtttaattctttgtatttatcccagcttcttaaatggtggctgtaacataataaatgtttaataaatgcttatatgaatggatttttagaattaactaagaagccaaaaatggcaacaatttacagaaatcccacctttccatgcttaagacaaaaatgtcttaaatataaagctgtgattatatcaaaaatccagataaatcatcaaatatatcagattaagaccagggtttacacacttaggcaatagtcctttccaaaccatgacaaaaactacaagtttatttataatttaacaactcagctgaaaatataacgggtatatttgttattctaactctattttttaaagttaataatataaagtggccatgtaaaatattttattttccaggctaaagcaaatgaaagtttgctggtatcaacacagcctgccatatttttcacagcatgcaacaatggtgctaggatagctatttcttactgtaattgccagaggcagaaatggtctgggtataagctatttcataaaagcagctttaaattgtcagtattaaggttttcatgtggaaaggtgtcattcaaaaaaaaagtaattggcatacatattccacatcatcgatcctctctgtggtgttaatttttttatatgaccagtagaaaaattttaatattctcacaatataggttttggggcttccatatcatcaaaagactgaaaaattataattttagaattaaactgatggatttcattatagaattatctgtgagttgtgtagacacagtcttaatgtttctggttatgacagataagtttgctcaaaaaatgtggatgaagccattattgttattattgttattgcttctgttcagttgtctaagtatcatcccttctgtggcccatcacgcagcagagttgccctacaaatttcatttggcagcgccataacattcatttaaaaagtttatgaaaacattcatttgaaagttccatgcagctttagcacagagttgaccaaacactggcgtaagttcaatttacacagaatatttgaattgaaacaatagaaatttttctcataatatatacctatgtgaaaccaacttatctgcataattaaatctaatacatatttaagccagtttaagtgctttgtgttgatgccatgcttatcaaatacatgcacaagctaaacataatttgaatgggtctatgaaggaaaaataatgcttagactttggtgtaggttcttcctgtgtagccatatacccaggctctgcagtatcgaaggatgcaaatgttgacatagatggaagctcttacctaccaaagtgtttaggaaggataaagttacatttgtcttaatttctaacattatctttgcttttatgtttcataaaaatttgtcattatttatgctggtgaaacgtataatcacatccaattatttgaacacatgcaaaataattttttaaattatgttattgtttaaatttgacttatgggagatcagtcaaaaacttagaaggtttaacacttcactgattaatggtgctgaaaacacgttacaattaccacatatccttgctataagttttgaagtttcttagcaattaaagtttttttattcagtgtgaactgtcagtatctattctggtgctaaatgtatggtgctaaatgaattgttagtgttgatggctttagtaatgctccttttattcattgctaaatttagtgttatccatttgattcctgattcagaaatatcaataaaatcctatgttaaattaatctttaccaaaaacaggcaagttaactctgttgttttaattcaacagtccaacattatttaggtgttacagagtgtaaatatatttctttgggagttattttctttttaaaatctttttatagcttggcaatgtccaaagtcaaatatcacctaaactggttagattacttctacagctaataatattgcaggcactggcgccctctggtggttatgaagacaaattcttaatggctacttgacctacagcaaaagccatttctgtaccataaaaatttgttgtgcaatattagaattatcatatgtttcctacatctgacagcacctaaaatgtttgataatattaacatgtatctaagaggaaaaaagagttaatatattctggcacccactttcctagtaatgttttccatgattttccagttctgaggcacttattaaagtgcttttttttttctgaattaattaggtattggtaaaatatatttttaaatttagttagctttataaacacaattagaattacaattaattaacagaggtataattgtctcactttcagaagtgatcatttatttttatttagcacaggtcataagaaaaatatatagaaaaataatcaatttcatatataaaaggattatttctccacctttaattattggcctatcatttgttagtgttatttggtcatattattgaactaatgtattattccattcaaagtctttctagatttaaaaatgtatgcaaaagcttaggattatatcatgtgtaactattatagataacatcctaaaccttcagtttagatatataattgactgggtgtaatctcttttgtaatctgttttgacagatttcttaaattatgttagcataatcaaggaagatttaccttgaagcactttccaaattgatactttcaaacttattttaaagcagtagaaccttttctatgaactaaatcacatgcaaaactccaacctgtagtatacataaaatggacttacttattcctctcaccttctccagtgcctaggaatattcttctctgagccctaggattgattctatcacacagagcaacattaatctaaatggtttagctccctcttttttctctaaaaacaatcagctaataaaaaaaaaatttgagggcctaaattatttcaatggttgtttgaaatattcagttcagtttgtacctgttagcagtctttcagtttgggggagaattaaatactgtgctaagctggtgcttggatacatattacagcatcttgtgttttatttgacaaacagaattttggtgccataatattttgagaattagagaagattgtgatgcatatatataaacactatttttaaaaaatatctaaatatgtctcacatatttatataatcctcaaatatactgtaccattttagatattttttaaacagattaatttggagaagttttattcattacctaattctgtggcaaaaatggtgcctctgatgttgtgatatagtattgtcagtgtgtacatatataaaacctgtgtaaacctctgtccttatgaaccataacaaatgtagctttttaaagtccattgtattgttttttctttcaataaaagagtataattaattggttgtttttgaa

SEQ ID NO: 6 - DNA, 28 bp, Artificial sequence
  KLHL8 forward
aaatttaaaggagtttaattgagtaaag

SEQ ID NO: 7 - DNA, 26 bp, Artificial sequence
  KLHL8 reverse
atacaccaacaccaatatctttaaac

SEQ ID NO: 8 - DNA, 23 bp, Artificial sequence
  KLHL8 sequencing
ctttaaacctattcttattccaa

SEQ ID NO: 9 - DNA, 28 bp, Artificial sequence
  ATP11A forward
ggtggaaagttggttattttgggtaatt

SEQ ID NO: 10 - DNA, 27 bp, Artificial sequence
  ATP11A reverse
cccaccaacccaaatacaatcacctac

SEQ ID NO: 11 - DNA, 22 bp, Artificial sequence
  ATP11A sequencing
atattttgtttttattggggta

SEQ ID NO: 12 - DNA, 30 bp, Artificial sequence
  FHAD1 forward
ttgggttatagtttgttgaatgttttaggt

SEQ ID NO: 13 - DNA, 28 bp, Artificial sequence
  FHAD1 reverse
attcttaaatcaaatctcctccctactc

SEQ ID NO: 14 - DNA, 19 bp, Artificial sequence
  FHAD1 sequencing
aaccatttctataacctct

SEQ ID NO: 15 - DNA, 24 bp, Artificial sequence
  PI15 forward
aggtttgaatgttgttggttagag

SEQ ID NO: 16 - DNA, 26 bp, Artificial sequence
  PI15 reverse
accacccaatcactatttttttctac

SEQ ID NO: 17 - DNA, 25 bp, Artificial sequence
  PI15 sequencing
agttaatagtttttatatgttatag

SEQ ID NO: 18 - DNA, 30 bp, Artificial sequence
  ALKBH5 forward
gtggttaattaagttgttttgagaatagtt

SEQ ID NO: 19 - DNA, 26 bp, Artificial sequence
  ALKBH5 reverse
cctaacccccaaaaaaaattaccatt

SEQ ID NO: 20 - DNA, 26 bp, Artificial sequence
  ALKBH5 sequencing
cctaacccccaaaaaaaattaccatt

SEQ ID NO: 21 - DNA, 25 bp, Artificial sequence
  Intergenic 1 forward
gggaaggagaatagtggtttattgt

SEQ ID NO: 22 - DNA, 29 bp, Artificial sequence
  Intergenic 1 reverse
ataactcactcctaaaaaaaaacctataa

SEQ ID NO: 23 - DNA, 17 bp, Artificial sequence
  Intergenic 1 sequencing
gtgggtttgaaataagt

SEQ ID NO: 24 - DNA, 29 bp, Artificial sequence
  Intergenic 2 forward
gtgagggattaattagttgttagttaagg

SEQ ID NO: 25 - DNA, 20 bp, Artificial sequence
  Intergenic 2 reverse
ctttccctcctaccccaaaa

SEQ ID NO: 26 - DNA, 24 bp, Artificial sequence
  Intergenic 2 sequencing
gttaaggttatatatttagaaggt

SEQ ID NO: 27 - DNA, 25 bp, Artificial sequence
  Intergenic 3 forward
ataaggagaggagagaggagataaa

SEQ ID NO: 28 - DNA, 29 bp, Artificial sequence
  Intergenic 3 reverse
acctcttaaattaaaaaaccaaatcatct

SEQ ID NO: 29 - DNA, 21 bp, Artificial sequence
  Intergenic 3 sequencing
gataaattgagaatgtaaggt

What is claimed is:

1. A method to distinguish metastatic-lethal prostate cancer (PCa) from indolent PCa in a subject comprising:
obtaining a primary tumor tissue sample from the subject;
assaying the sample to detect methylation status of cytosines located in one or more epigenetic loci selected from Intergenic 1, Intergenic 2, FHAD1, ALKBH5, KLHL8, ATP11A, Intergenic 3, and PI15;
obtaining a value for each selected epigenetic loci based on the assaying;
calculating a β difference; and
determining the sample is metastatic-lethal PCa or indolent PCa based on the β difference(s) thereby distinguishing metastatic-lethal prostate cancer (PCa) from indolent PCa in the subject.

2. A method of claim 1 wherein the cytosines are part of CpG pairs.

3. A method of claim 2 wherein the CpG pairs are within CpG islands.

4. A method of claim 1 wherein the cytosines are within CpG site: cg01135464; CpG site: cg02223001; CpG site: cg02394978; CpG site: cg07166550; CpG site: cg16713292; CpG site: cg21513610; CpG site: cg22501793; and/or CpG site: cg24349665,

5. A method of claim 1 wherein the cytosines are all cytosines within CpG pairs within the selected epigenetic loci.

6. A method of claim 1 wherein the calculating a β difference utilizes a reference level derived from a population of subjects with indolent PCa.

7. A method of claim 6 wherein a positive β difference for Intergenic 1, Intergenic 2, Intergenic 3, and/or PI15 distinguishes the sample as metastatic-lethal PCa.

8. A method of claim 6 wherein a negative β difference for Intergenic 1, Intergenic 2, Intergenic 3, and/or PI15 distinguishes the sample as indolent PCa.

9. A method of claim 6 wherein a negative β difference for FHAD1, ALKBH5, KLHL8, and/or ATP11A distinguishes the sample as metastatic-lethal PCa.

10. A method of claim 6 wherein a positive β difference for FHAD1, ALKBH5, KLHL8, and/or ATP11A distinguishes the sample as indolent PCa.

11. A method of claim 1 wherein calculating a β difference utilizes a reference level derived from a population of subjects with metastatic-lethal PCa.

12. A method of claim 11 wherein a negative β difference for Intergenic 1, Intergenic 2, Intergenic 3, and/or PI15 as compared to the reference level distinguishes the sample as indolent PCa.

13. A method of claim 11 wherein a positive β difference for Intergenic 1, Intergenic 2, Intergenic 3, and/or PI15 distinguishes the sample as metastatic-lethal PCa.

14. A method of claim 11 wherein a positive β difference for FHAD1, ALKBH5, KLHL8, and/or ATP11A distinguishes the sample as indolent PCa.

15. A method of claim 11 wherein a negative β difference for FHAD1, ALKBH5, KLHL8, and/or ATP11A distinguishes the sample as metastatic-lethal PCa.

16. A method of claim 1 wherein the method comprises assaying the sample to detect methylation status of cytosines located in Intergenic 1; Intergenic 2; FHAD1; ALKBH5; KLHL8; ATP11A; Intergenic 3; and PI15.

17. A method of claim 1 wherein the method comprises assaying the sample to detect methylation status of cytosines located in Intergenic 1 and the methylation status of cytosines located in one or more of Intergenic 2; FHAD1; ALKBH5; KLHL8; ATP11A; Intergenic 3; and PI15.

18. A method of claim 1 wherein the method comprises assaying the sample to detect methylation status of cytosines located in Intergenic 2 and the methylation status of cytosines located in one or more of Intergenic 1; FHAD1; ALKBH5; KLHL8; ATP11A; Intergenic 3; and PI15.

19. A method of claim 1 wherein the method comprises assaying the sample to detect methylation status of cytosines located in FHAD1 and the methylation status of cytosines located in one or more of Intergenic 1; Intergenic 2; ALKBH5; KLHL8; ATP11A; Intergenic 3; and PI15.

20. A method of claim 1 wherein the method comprises assaying the sample to detect methylation status of cytosines located in ALKBH5 and the methylation status of cytosines located in one or more of Intergenic 1; Intergenic 2; FHAD1; KLHL8; ATP11A; Intergenic 3; and PI15.

21. A method of claim 1 wherein the method comprises assaying the sample to detect methylation status of cytosines located in KLHL8 and the methylation status of cytosines located in one or more of Intergenic 1; Intergenic 2; FHAD1; ALKBH5; ATP11A; Intergenic 3; and PI15.

22. A method of claim 1 wherein the method comprises assaying the sample to detect methylation status of cytosines located in ATP11A and the methylation status of cytosines located in one or more of Intergenic 1; Intergenic 2; FHAD1; ALKBH5; KLHL8; Intergenic 3; and PI15.

23. A method of claim 1 wherein the method comprises assaying the sample to detect methylation status of cytosines located in Intergenic 3 and the methylation status of cytosines located in one or more of Intergenic 1; Intergenic 2; FHAD1; ALKBH5; KLHL8; ATP11A; and PI15.

24. A method of claim 1 wherein the method comprises assaying the sample to detect methylation status of cytosines located in PI15 and the methylation status of cytosines located in one or more of Intergenic 1; Intergenic 2; FHAD1; ALKBH5; KLHL8; ATP11A; and Intergenic 3.

25. A method of claim 1 wherein the method comprises assaying the sample to detect methylation status of cytosines located in one or more of ALKBH5, FHAD1, KLHL8 and PI15 and wherein the methylation status improves the prognostic determination of a Gleason score.

26. A method of claim 25 wherein the Gleason score is a 4+3=7 or a 3+4=7 Gleason score.

27. A method of claim 25 wherein the Gleason score is a <=6 or a 8-10 Gleason score.

28. A method of claim 1 wherein the sample is a primary PCa tumor sample.

29. A method of claim 25 wherein the improved prognostic determination reduces false negatives.

30. A method of claim 25 wherein the improved prognostic determination reduces false positives.

31. A method of claim 1 wherein distinguishing the PCa as metastatic-lethal directs an aggressive or experimental treatment.

32. A method of claim 1 wherein distinguishing the PCa as indolent directs moderate, minimal, or no treatment.

33. A method of claim 1 wherein the assaying comprises a bisulfite-based methylation assay.

34. A method of claim 1 wherein the assaying comprises pyrosequencing.

35. A method of any of claims 1-34 wherein the β difference is a mean β difference.

36. A kit for distinguishing metastatic-lethal PCa from indolent PCa comprising reagents to detect methylation status of cytosines located in one or more epigenetic loci selected from Intergenic 1, Intergenic 2, FHAD1, ALKBH5, KLHL8, ATP11A, Intergenic 3, and PI15.

37. A kit of claim 36 comprising bisulfate and PCR primers specific for bisulfite-converted DNA.

38. A kit of claim 36 including DNA-fragmenting enzymes.

39. A kit of claim 36 comprising target-specific probes for CpG pairs within any of SEQ ID NOs: 1-5.

40. A kit of claim 36 comprising target-specific probes for CpG pairs within CpG site: cg01135464; CpG site: cg02223001; CpG site: cg02394978; CpG site: cg07166550; CpG site: cg16713292; CpG site: cg21513610; CpG site: cg22501793; and/or CpG site: cg24349665.

41. A kit of claim 36 comprising one or more nucleotides including one or more of SEQ ID NOs: 6-29.

42. A kit of claim 36 comprising a reference level.

43. A kit of claim 42 wherein the reference level is derived from a population of subjects with indolent PCa.

44. A kit of claim 43 wherein up-regulation of methylation status at Intergenic 1, Intergenic 2, Intergenic 3, and/or PI15 as compared to the reference level distinguishes the sample as metastatic-lethal PCa.

45. A kit of claim 43 wherein lack of a statistically-significant difference in methylation status at Intergenic 1, Intergenic 2, Intergenic 3, and/or PI15 as compared to the reference level distinguishes the sample as indolent PCa.

46. A kit of claim 43 wherein down-regulation of methylation status at FHAD1, ALKBH5, KLHL8, and/or ATP11A as compared to the reference level distinguishes the sample as metastatic-lethal PCa.

47. A kit of claim 43 wherein lack of a statistically-significant difference in methylation status at FHAD1, ALKBH5, KLHL8, and/or ATP11A as compared to the reference level distinguishes the sample as indolent PCa.

48. A kit of claim 42 wherein the reference level is derived from a population of subjects with metastatic-lethal PCa.

49. A kit of claim 48 wherein down-regulation of methylation status at Intergenic 1, Intergenic 2, Intergenic 3, and/or PI15 as compared to the reference level distinguishes the sample as indolent PCa.

50. A kit of claim 48 wherein lack of a statistically-significant difference in methylation status at Intergenic 1, Intergenic 2, Intergenic 3, and/or PI15 as compared to the reference level distinguishes the sample as metastatic-lethal PCa.

51. A kit of claim 48 wherein up-regulation of methylation status at FHAD1, ALKBH5, KLHL8, and/or ATP11A as compared to the reference level distinguishes the sample as indolent PCa.

52. A kit of claim 48 wherein lack of a statistically-significant difference in methylation status at FHAD1, ALKBH5, KLHL8, and/or ATP11A as compared to the reference level distinguishes the sample as metastatic-lethal PCa.

53. A kit of claim 36 wherein the kit comprises reagents to detect methylation status of cytosines located in Intergenic 1; Intergenic 2; FHAD1; ALKBH5; KLHL8; ATP11A; Intergenic 3; and PI15.

54. A kit of claim 36 wherein the kit comprises reagents to detect methylation status of cytosines located in Intergenic 1 and methylation status of cytosines located in one or more of Intergenic 2; FHAD1; ALKBH5; KLHL8; ATP11A; Intergenic 3; and PI15.

55. A kit of claim 36 wherein the kit comprises reagents to detect methylation status of cytosines located in Intergenic 2 and methylation status of cytosines located in one or more of Intergenic 1; FHAD1; ALKBH5; KLHL8; ATP11A; Intergenic 3; and PI15.

56. A kit of claim 36 wherein the kit comprises reagents to detect methylation status of cytosines located in FHAD1 and methylation status of cytosines located in one or more of Intergenic 1; Intergenic 2; ALKBH5; KLHL8; ATP11A; Intergenic 3; and PI15.

57. A kit of claim 36 wherein the kit comprises reagents to detect methylation status of cytosines located in ALKBH5 and methylation status of cytosines located in one or more of Intergenic 1; Intergenic 2; FHAD1; KLHL8; ATP11A; Intergenic 3; and PI15.

58. A kit of claim 36 wherein the kit comprises reagents to detect methylation status of cytosines located in KLHL8 and methylation status of cytosines located in one or more of Intergenic 1; Intergenic 2; FHAD1; ALKBH5; ATP11A; Intergenic 3; and PI15.

59. A kit of claim 36 wherein the kit comprises reagents to detect methylation status of cytosines located in ATP11A and methylation status of cytosines located in one or more of Intergenic 1; Intergenic 2; FHAD1; ALKBH5; KLHL8; Intergenic 3; and PI15.

60. A kit of claim 36 wherein the kit comprises reagents to detect methylation status of cytosines located in Intergenic 3 and methylation status of cytosines located in one or more of Intergenic 1; Intergenic 2; FHAD1; ALKBH5; KLHL8; ATP11A; and PI15.

61. A kit of claim 36 wherein the kit comprises reagents to detect methylation status of cytosines located in PI15 and methylation status of cytosines located in one or more of Intergenic 1; Intergenic 2; FHAD1; ALKBH5; KLHL8; ATP11A; and Intergenic 3.

62. A kit of claim 36 comprising reagents to perform a bisulfite-based methylation assay.

63. A kit of claim 36 comprising reagents to perform pyrosequencing.

64. A kit of claim 36 comprising probes and silicon based arrays to perform a methylation assay.

65. A kit of claim 64 wherein the probes comprise beads.

66. A kit of claim 65 wherein the beads are configured to allow a detectable label to be bound.

67. A kit of claim 36 comprising proteins and/or nucleotide sequences that bind to one or more proteins encoded by, and/or one or more nucleotide sequences corresponding to, one or more of Intergenic 1; Intergenic 2; FHAD1; ALKBH5; KLHL8; ATP11A; Intergenic 3; and PI15.

68. A kit of claim 36 comprising a DNA nucleotide sequence and/or a RNA nucleotide sequence.

69. A kit of claim 67 wherein the proteins comprise antibodies, epitopes, or mimitopes.

70. A kit of claim 36 comprising a detectable label.

71. A kit of claim 70 wherein the detectable label is a radioactive isotope, enzyme, dye, fluorescent dye, magnetic bead, or biotin.

72. A method to improve the prognostic determination of a subject's Gleason score comprising distinguishing metastatic-lethal prostate cancer (PCa) from indolent PCa in the subject by:
obtaining a primary tumor tissue sample from the subject;
assaying the sample to detect methylation status of cytosines located in one or more epigenetic loci selected from Intergenic 1, Intergenic 2, FHAD1, ALKBH5, KLHL8, ATP11A, Intergenic 3, and PI15;
obtaining a value for each selected epigenetic loci based on the assaying;
calculating a β difference; and
determining the sample is metastatic-lethal PCa or indolent PCa based on the β difference(s) thereby distinguishing metastatic-lethal prostate cancer (PCa) from indolent PCa in the subject and improve the prognostic determination of the subject's Gleason score.

73. A method of claim 72 wherein the cytosines are part of CpG pairs.

74. A method of claim 73 wherein the CpG pairs are within CpG islands.

75. A method of claim 72 wherein the cytosines are within CpG site: cg01135464; CpG site: cg02223001; CpG site: cg02394978; CpG site: cg07166550; CpG site: cg16713292; CpG site: cg21513610; CpG site: cg22501793; and/or CpG site: cg24349665,

76. A method of claim 72 wherein the cytosines are all cytosines within CpG pairs within the selected epigenetic loci.

77. A method of claim 72 wherein the calculating a β difference utilizes a reference level derived from a population of subjects with indolent PCa.

78. A method of claim 77 wherein a positive β difference for Intergenic 1, Intergenic 2, Intergenic 3, and/or PI15 distinguishes the sample as metastatic-lethal PCa.

79. A method of claim 77 wherein an equal or negative β difference for Intergenic 1, Intergenic 2, Intergenic 3, and/or PI15 distinguishes the sample as indolent PCa.

80. A method of claim 77 wherein a negative β difference for FHAD1, ALKBH5, KLHL8, and/or ATP11A distinguishes the sample as metastatic-lethal PCa.

81. A method of claim 77 wherein an equal or positive β difference for FHAD1, ALKBH5, KLHL8, and/or ATP11A distinguishes the sample as indolent PCa.

82. A method of claim 72 wherein the calculating a β difference utilizes a reference level derived from a population of subjects with metastatic-lethal PCa.

83. A method of claim 82 wherein a negative β difference for Intergenic 1, Intergenic 2, Intergenic 3, and/or PI15 as compared to the reference level distinguishes the sample as indolent PCa.

84. A method of claim 82 wherein an equal or positive β difference for Intergenic 1, Intergenic 2, Intergenic 3, and/or PI15 distinguishes the sample as metastatic-lethal PCa.

85. A method of claim 82 wherein a positive β difference for FHAD1, ALKBH5, KLHL8, and/or ATP11A distinguishes the sample as indolent PCa.

86. A method of claim 82 wherein an equal or negative β difference for FHAD1, ALKBH5, KLHL8, and/or ATP11A distinguishes the sample as metastatic-lethal PCa.

87. A method of claim 72 wherein the method comprises assaying the sample to detect methylation status of cytosines located in Intergenic 1; Intergenic 2; FHAD1; ALKBH5; KLHL8; ATP11A; Intergenic 3; and PI15.

88. A method of claim 72 wherein the method comprises assaying the sample to detect methylation status of cytosines located in Intergenic 1 and the methylation status of cytosines located in one or more of Intergenic 2; FHAD1; ALKBH5; KLHL8; ATP11A; Intergenic 3; and PI15.

89. A method of claim 72 wherein the method comprises assaying the sample to detect methylation status of cytosines located in Intergenic 2 and the methylation status of cytosines located in one or more of Intergenic 1; FHAD1; ALKBH5; KLHL8; ATP11A; Intergenic 3; and PI15.

90. A method of claim 72 wherein the method comprises assaying the sample to detect methylation status of cytosines located in FHAD1 and the methylation status of cytosines located in one or more of Intergenic 1; Intergenic 2; ALKBH5; KLHL8; ATP11A; Intergenic 3; and PI15.

91. A method of claim 72 wherein the method comprises assaying the sample to detect methylation status of cytosines located in ALKBH5 and the methylation status of cytosines located in one or more of Intergenic 1; Intergenic 2; FHAD1; KLHL8; ATP11A; Intergenic 3; and PI15.

92. A method of claim 72 wherein the method comprises assaying the sample to detect methylation status of cytosines located in KLHL8 and the methylation status of cytosines located in one or more of Intergenic 1; Intergenic 2; FHAD1; ALKBH5; ATP11A; Intergenic 3; and PI15.

93. A method of claim 72 wherein the method comprises assaying the sample to detect methylation status of cytosines located in ATP11A and the methylation status of cytosines located in one or more of Intergenic 1; Intergenic 2; FHAD1; ALKBH5; KLHL8; Intergenic 3; and PI15.

94. A method of claim 72 wherein the method comprises assaying the sample to detect methylation status of cytosines located in Intergenic 3 and the methylation status of cytosines located in one or more of Intergenic 1; Intergenic 2; FHAD1; ALKBH5; KLHL8; ATP11A; and PI15.

95. A method of claim 72 wherein the method comprises assaying the sample to detect methylation status of cytosines located in PI15 and the methylation status of cytosines located in one or more of Intergenic 1; Intergenic 2; FHAD1; ALKBH5; KLHL8; ATP11A; and Intergenic 3.

96. A method of claim 72 wherein the Gleason score is a 3+4=7 or a 4+3=7 Gleason score.

97. A method of claim 72 wherein the Gleason score is a <=6 or a 8-10 Gleason score.

98. A method of claim 72 wherein the sample is a primary PCa tumor sample.

99. A method of claim 72 wherein the improved prognostic determination reduces false negatives.

100. A method of claim 72 wherein the improved prognostic determination reduces false positives.

101. A method of claim 72 wherein the assaying comprises a bisulfite-based methylation assay.

102. A method of claim 72 wherein the assaying comprises pyrosequencing.

103. A method of any of claims 72-102 wherein the β difference is a mean β difference.
